(19) United States
(12) Patent Application Publication
(10) Pub. No.: US 2025/0262302 A1
(43) Pub. Date: Aug. 21, 2025

(54) Compositions and Methods for Reducing MHC Class I in a Cell

(71) Applicant: Intellia Therapeutics, Inc., Cambridge, MA (US)

(72) Inventors: Birgit Schultes, Arlington, MA (US); Yong Zhang, Bedford, MA (US); Boning Zhang, Cambridge, MA (US); Özgün Kiliç, Cambridge, MA (US); Ishina Balwani, Cambridge, MA (US); Biao Liu, Cambridge, MA (US)

(73) Assignee: Intellia Therapeutics, Inc., Cambridge, MA (US)

(21) Appl. No.: 18/980,462

(22) Filed: Dec. 13, 2024

Related U.S. Application Data
(63) Continuation of application No. PCT/US23/68498, filed on Jun. 15, 2023.
(60) Provisional application No. 63/494,208, filed on Apr. 4, 2023.
(60) Provisional application No. 63/352,991, filed on Jun. 16, 2022.

(51) Int. Cl. A61K 40/22; A61K 40/31; C12N 9/22; C12N 15/11; C12N 15/90

(52) U.S. Cl. CPC A61K 40/22; A61K 40/31; C12N 9/226; C12N 15/11; C12N 15/907; C12N 2310/20

(57) ABSTRACT

Compositions and methods for reducing MHC class I protein expression in a cell comprising genetically modifying MHC class I for use e.g., in adoptive cell transfer therapies.

### I. CROSS-REFERENCE TO RELATED APPLICATION

[0001] This application is a continuation of International Application No. PCT/US2023/068498, filed on Jun. 15, 2023, which claims the benefit under 35 USC 119(e) of U.S. Provisional Application No. 63/352,991, filed Jun. 16, 2022, and U.S. Provisional Application No. 63/494,208, filed Apr. 4, 2023, the content of each of which is herein incorporated by reference in its entirety.

### II. REFERENCE TO AN ELECTRONIC SEQUENCE LISTING

[0002] This application contains a sequence listing, which has been submitted electronically in XML file format and is hereby incorporated by reference in its entirety. Said XML file, created on Jun. 13, 2023, is named “01155-0054-OOPCT_SL.xml” and is 14,122,813 bytes in size.

### III. INTRODUCTION AND SUMMARY

[0003] The ability to downregulate MHC class I is critical for many in vivo and ex vivo utilities, e.g., when using allogeneic cells (originating from a donor) for transplantation or e.g., for creating a cell population in vitro that does not activate T cells. In particular, the transfer of allogeneic cells into a subject is of great interest to the field of cell therapy. The use of allogeneic cells has been limited due to the problem of rejection by the recipient subject's immune cells, which recognize the transplanted cells as foreign and mount an attack. To avoid the problem of immune rejection, cell-based therapies have focused on autologous approaches that use a subject's own cells as the cell source for therapy, an approach that is time-consuming and costly.

[0004] Typically, immune rejection of allogeneic cells results from a mismatching of major histocompatibility complex (MHC) molecules between the donor and recipient. Within the human population, MHC molecules exist in various forms, including e.g., numerous genetic variants of any given MHC gene, i.e., alleles, encoding different forms of MHC protein. The primary classes of MHC molecules are referred to as MHC class I and MHC class II. MHC class I molecules (e.g., HLA-A, HLA-B, and HLA-C in humans) are expressed on all nucleated cells and present antigens to activate cytotoxic T cells (CD8+ T cells or CTLs). MHC class II molecules (e.g., HLA-DP, HLA-DQ, and HLA-DR in humans) are expressed on only certain cell types (e.g., B cells, dendritic cells, and macrophages) and present antigens to activate helper T cells (CD4+ T cells or Th cells), which in turn provide signals to B cells to produce antibodies.

[0005] Slight differences, e.g., mismatches in MHC alleles between individuals can cause the T cells in a recipient to become activated. During T cell development, an individual's T cell repertoire is tolerized to one's own MHC molecules, but T cells that recognize another individual's MHC molecules may persist in circulation and are referred to as alloreactive T cells. Alloreactive T cells can become activated e.g., by the presence of another individual's cells expressing MHC molecules in the body, causing e.g., graft versus host disease and transplant rejection.

[0006] While fully matching HLA types between donor and recipient is theoretically possible as a means of reducing transplant rejection, such an approach is logistically and practically challenging given the diversity of HLA alleles across the population to fully match e.g., 10 out 10 alleles (i.e., 2 alleles for each of HLA-A, HLA-B, HLA-C, HLA-DRB1, and HLA-DQB1).

[0007] Methods and compositions for reducing the susceptibility of an allogeneic cell to rejection are of interest, including e.g., reducing the cell's expression of MHC protein to avoid recipient T cell responses. In practice, the ability to genetically modify an allogeneic cell for transplantation into a subject has been hampered by the requirement for multiple gene edits to reduce all MHC protein expression, while at the same time, avoiding other harmful recipient immune responses. For example, while strategies to deplete MHC class I protein may reduce activation of CTLs, cells that lack MHC class I on their surface are susceptible to lysis by natural killer (NK) cells of the immune system because NK cell activation is regulated by MHC class I-specific inhibitory receptors. Moreover, while several groups have studied the NK protective effects of the different MHC class I components, some inconsistencies remain in the field. See, e.g., Keystone 2022 presentation “Multiplex Base Editing Mitigates CAR-T Cell Allorejection” by Beam Therapeutics—Workshop: Therapeutic Applications session, Apr. 29, 2022 (“Keystone Presentation”). For example, the Keystone Presentation concluded that retention of HLA-A, not HLA-B or —C, afforded protection against NK killing in vitro, while other groups have shown that HLA-C is important in inhibiting NK activity (Xu et al. 2019, Cell Stem Cell 24, 566-578). Further still, earlier studies suggest HLA-E and HLA-G provide some but not complete protection. Therefore, safely reducing or eliminating expression of MHC class I has proven challenging.

[0008] Gene editing strategies to deplete MHC class II molecules have also proven difficult particularly in certain cell types for reasons including low editing efficiencies and low cell survival rates, preventing practical application as a cell therapy.

[0009] Thus, there exists a need for improved methods and compositions for modifying allogeneic cells to overcome the problem of recipient immune rejection and the technical difficulties associated with the multiple genetic modifications required to produce a safer cell for transplant.

[0010] The present disclosure provides engineered human cells with reduced or eliminated surface expression of HLA-B protein relative to an unmodified cell, wherein the cell is homozygous for HLA-A and HLA-C, or wherein the cell has reduced or eliminated surface expression of HLA-A and HLA-B protein relative to an unmodified cell and is homozygous for HLA-C. The engineered human cells disclosed herein therefore provide a “partial matching” approach to the problem of allogeneic cell transfer and MHC class I compatibility. The use of cells that have reduced or eliminated expression of HLA-B and are homozygous for HLA-A and HLA-C, or that have reduced or eliminated expression of HLA-A and HLA-B and are homozygous for HLA-C, limits the number of donors that are necessary to provide a therapy that covers a majority of recipients in population because the disclosed partial matching approach requires only one matching HLA-A allele (as opposed to two) and only one HLA-C allele (as opposed to two), or requires only one matching HLA-C allele (as opposed to two). Surprisingly, the engineered human cells that have reduced or eliminated surface expression of HLA-B protein only or both HLA-A and HLA-B protein relative to an unmodified cell, disclosed herein, demonstrate persistence and are protective against NK-mediated rejection, especially as compared to engineered cells with reduced or eliminated B2M expression. The disclosure provides methods and compositions for generating such engineered human cells with reduced or eliminated surface expression of HLA-B protein only or both HLA-A and HLA-B protein relative to an unmodified cell, wherein the cell is homozygous for both HLA-A and HLA-C or HLA-C only. In some embodiments, the disclosure provides engineered human cells, and methods and compositions for generating engineered human cells, wherein the cell further has reduced or eliminated expression of MHC class II protein on the surface of the cell, e.g., wherein the cell has a genetic modification in the CIITA gene. In some embodiments, the disclosure provides for further engineering of the cell, including to reduce or eliminate the expression of endogenous T cell receptor proteins (e.g., TRAC, TRBC), and to introduce an exogenous nucleic acid, e.g., encoding a polypeptide expressed on the cell surface or a polypeptide that is secreted by the cell. Thus, the disclosure thus provides a flexible platform for genetically engineering human cells for a variety of desired adoptive cell therapy purposes.

[0011] Provided herein is an engineered human cell, which has reduced or eliminated surface expression of HLA-B protein relative to an unmodified cell, comprising a genetic modification in the HLA-B gene, wherein the cell is homozygous for HLA-A and homozygous for HLA-C. Also provided is an engineered human cell, which has reduced or eliminated surface expression of HLA-B protein relative to an unmodified cell, comprising a genetic modification in the HLA-B gene, wherein the genetic modification comprises at least one nucleotide within the genomic coordinates chosen from: (a) chr6:31354480-31357174 or (b) chr6:31354623-31357108 or 31354497-31357157, wherein the cell is homozygous for HLA-A and homozygous for HLA-C.

[0012] Provided herein is an engineered human cell, which has reduced or eliminated surface expression of HLA-A and HLA-B protein relative to an unmodified cell, comprising (i) a genetic modification in the HLA-A gene, wherein the genetic modification in the HLA-A gene comprises at least one nucleotide within the genomic coordinates chosen from chr6: 29942854-chr6:29942913 and chr6:29943518-chr6:29943619, and (ii) a genetic modification in the HLA-B gene, wherein the genetic modification in the HLA-B gene comprises at least one nucleotide within the genomic coordinates chosen from: (a) chr6:31354480-31357174 or (b) chr6: 31354623-31357108 or 31354497-31357157, wherein the cell is homozygous for HLA-C.

[0013] Provided herein is an engineered human cell, which has reduced or eliminated surface expression of HLA-B protein relative to an unmodified cell, comprising a genetic modification in the HLA-B gene, wherein the genetic modification comprises at least one nucleotide within the genomic coordinates chosen from: chr6:31355182-31355202; chr6:31355348-31355368; chr6:31355145-31355165; chr6:31355349-31355369; chr6:31356381-31356401; chr6:31356380-31356400; chr6:31355204-31355224; chr6:31355205-31355225; chr6:31355191-31355211; chr6:31355192-31355212; chr6:31355193-31355213; chr6:31355198-31355218; chr6:31355320-31355340; chr6:31355319-31355339; chr6:31355347-31355367; chr6:31355432-31355452; chr6:31355340-31355360; chr6:31355410-31355430; chr6:31355414-31355434; or chr6:31355409-31355429.

[0014] Provided herein is an engineered human cell, which has reduced or eliminated surface expression of HLA-B protein relative to an unmodified cell, comprising a genetic modification in the HLA-B gene, wherein the genetic modification comprises at least one nucleotide within the genomic coordinates chosen from: chr6:31355182-31355202; chr6:31355349-31355369; chr6:31355348-31355368; or chr6:31355145-31355165.

[0015] Provided herein is an engineered human cell, which has reduced or eliminated surface expression of HLA-B protein relative to an unmodified cell, comprising a genetic modification in the HLA-B gene, wherein the genetic modification comprises at least one nucleotide within the genomic coordinates chosen from: chr6:31355348-31355368; chr6:31355349-31355369; chr6:31356381-31356401; chr6:31356380-31356400; chr6:31355204-31355224; chr6:31355205-31355225; chr6:31355191-31355211; chr6:31355192-31355212; chr6:31355193-31355213; chr6:31355198-31355218; chr6:31355320-31355340; chr6:31355319-31355339; chr6:31355182-31355202; chr6:31355178-31355198; chr6:31355347-31355367; chr6:31355145-31355165; chr6:31355432-31355452; chr6:31355340-31355360; or chr6:31355414-31355434.

[0016] Provided herein is an engineered human cell, which has reduced or eliminated surface expression of HLA-B protein relative to an unmodified cell, comprising a genetic modification in the HLA-B gene, wherein the genetic modification comprises at least one nucleotide within the genomic coordinates chosen from: chr6:31355348-31355368; chr6:31355349-31355369; chr6:31356381-31356401; chr6:31356380-31356400; chr6:31355205-31355225; chr6:31355191-31355211; chr6:31355192-31355212; chr6:31355193-31355213; chr6:31355198-31355218; chr6:31355320-31355340; chr6:31355319-31355339; chr6:31355182-31355202; chr6:31355178-31355198; chr6:31355347-31355367; chr6:31355145-31355165; chr6:31355432-31355452; chr6:31355340-31355360; chr6:31355410-31355430; chr6:31355414-31355434; or chr6:31355409-31355429.

[0017] Provided herein is an engineered human cell, which has reduced or eliminated surface expression of HLA-B protein relative to an unmodified cell, comprising a genetic modification in the HLA-B gene, wherein the genetic modification comprises at least one nucleotide within the genomic coordinates chosen from: chr6:31355348-31355368, chr6:31355349-31355369, chr6:31355192-31355212, chr6:31355347-31355367, chr6:31355340-31355360, chr6:31355409-31355429.

[0018] Provided herein is an engineered human cell, which has reduced or eliminated surface expression of HLA-B protein relative to an unmodified cell, comprising a genetic modification in the HLA-B gene, wherein the genetic modification comprises at least one nucleotide within the genomic coordinates chosen from: chr6:31355349-31355369 or chr6:31355348-31355368.

[0019] Provided herein is an engineered human cell, which has reduced or eliminated surface expression of HLA-B protein relative to an unmodified cell, comprising a genetic modification in the HLA-B gene, wherein the genetic modification comprises at least one nucleotide within the genomic coordinates chosen from: chr6:31355192-31355212 or chr6:31355347-31355367.

[0020] Provided herein is an engineered human cell, which has reduced or eliminated surface expression of HLA-B protein relative to an unmodified cell, comprising a genetic modification in the HLA-B gene, wherein the genetic modification comprises at least one nucleotide within the genomic coordinates chosen from: chr6:31355347-31355367; chr6:31355340-31355360; or chr6:31355409-31355429.

[0021] Provided herein is an engineered human cell, which has reduced or eliminated surface expression of HLA-B protein relative to an unmodified cell, comprising a genetic modification in the HLA-B gene, wherein the genetic modification comprises at least one nucleotide within the genomic coordinates chosen from: chr6:31355348-31355368; chr6:31355145-31355165; chr6:31355347-31355367; chr6:31355432-31355452; or chr6:31355340-31355360.

[0022] Provided herein is an engineered human cell, which has reduced or eliminated surface expression of HLA-B protein relative to an unmodified cell, comprising a genetic modification in the HLA-B gene, wherein the genetic modification comprises at least one nucleotide within the genomic coordinates chosen from: chr6:31356777-31356801; chr6:31355492-31355516; chr6:31355379-31355403; chr6:31355491-31355515; chr6:31355361-31355385; chr6:31355356-31355380; chr6:31355460-31355484; chr6:31357078-31357102; chr6:31355417-31355441; chr6:31355366-31355390; chr6:31355415-31355439; chr6:31355378-31355402; chr6:31355166-31355190; chr6:31355401-31355425; chr6:31355469-31355493; chr6:31355221-31355245; chr6:31355222-31355246; chr6:31355205-31355229; chr6:31355446-31355470; chr6:31356425-31356449; chr6:31355441-31355465; chr6:31355203-31355227; chr6:31356437-31356461; chr6:31356426-31356450; chr6:31356763-31356787; or chr6:31356764-31356788.

[0023] Provided herein is an engineered human cell, which has reduced or eliminated surface expression of HLA-B protein relative to an unmodified cell, comprising a genetic modification in the HLA-B gene, wherein the genetic modification comprises at least one nucleotide within the genomic coordinates chosen from: chr6:31356777-31356801; chr6:31355492-31355516; chr6:31355361-31355385; chr6:31355379-31355403; chr6:31355491-31355515; chr6:31355356-31355380; chr6:31355366-31355390; chr6:31355417-31355441; chr6:31357078-31357102; chr6:31355460-31355484; chr6:31355415-31355439; chr6:31355166-31355190; chr6:31355378-31355402; chr6:31355401-31355425; chr6:31356262-31356286; chr6:31355221-31355245; chr6:31355222-31355246; chr6:31355205-31355229; chr6:31355446-31355470; chr6:31356425-31356449; chr6:31355441-31355465; chr6:31355203-31355227; chr6:31356437-31356461; chr6:31356426-31356450; chr6:31356763-31356787; or chr6:31356764-31356788.

[0024] Provided herein is an engineered human cell, which has reduced or eliminated surface expression of HLA-B protein relative to an unmodified cell, comprising a genetic modification in the HLA-B gene, wherein the genetic modification comprises at least one nucleotide within the genomic coordinates chosen from: chr6:31356777-31356801; chr6:31355492-31355516; chr6:31355379-31355403; chr6:31355491-31355515; chr6:31355361-31355385; chr6:31355356-31355380; chr6:31355460-31355484; chr6:31357078-31357102; chr6:31355417-31355441; chr6:31355366-31355390; chr6:31355221-31355245; chr6:31355222-31355246; chr6:31355205-31355229; chr6:31355446-31355470; chr6:31356425-31356449; chr6:31355441-31355465; chr6:31355203-31355227; chr6:31356437-31356461; or chr6:31356426-31356450.

[0025] Provided herein is an engineered human cell, which has reduced or eliminated surface expression of HLA-B protein relative to an unmodified cell, comprising a genetic modification in the HLA-B gene, wherein the genetic modification comprises at least one nucleotide within the genomic coordinates chosen from: chr6:31356777-31356801; chr6:31355492-31355516; chr6:31355379-31355403; chr6:31355491-31355515; chr6:31355361-31355385; chr6:31355221-31355245; chr6:31355222-31355246; chr6:31355205-31355229; chr6:31355446-31355470; chr6:31356425-31356449; or chr6:31355441-31355465.

[0026] Provided herein is an engineered human cell, which has reduced or eliminated surface expression of HLA-B protein relative to an unmodified cell, comprising a genetic modification in the HLA-B gene, wherein the genetic modification comprises at least one nucleotide within the genomic coordinates chosen from: chr6:31355221-31355245; chr6:31355222-31355246; chr6:31355205-31355229; chr6:31355446-31355470; chr6:31356425-31356449; or chr6:31355441-31355465.

[0027] Provided herein is an engineered human cell, which has reduced or eliminated surface expression of HLA-B protein relative to an unmodified cell, comprising a genetic modification in the HLA-B gene, wherein the genetic modification comprises at least one nucleotide within the genomic coordinates chosen from: chr6:31356777-31356801; chr6:31355492-31355516; chr6:31355379-31355403; chr6:31355491-31355515; chr6:31355361-31355385; chr6:31355356-31355380; chr6:31355460-31355484; chr6:31357078-31357102; chr6:31355417-31355441; chr6:31355366-31355390; chr6:31355415-31355439; chr6:31355378-31355402; chr6:31355166-31355190; chr6:31355401-31355425; chr6:31355469-31355493; chr6:31356262-31356286; chr6:31355419-31355443; chr6:31355390-31355414; chr6:31355369-31355393; chr6:31355221-31355245; chr6:31355222-31355246; chr6:31355205-31355229; chr6:31355446-31355470; chr6:31356425-31356449; chr6:31355441-31355465; chr6:31355203-31355227; chr6:31356437-31356461; chr6:31356426-31356450; chr6:31356763-31356787; chr6:31356764-31356788; chr6:31356762-31356786; chr6:31355204-31355228; chr6:31356436-31356460; or chr6:31356767-31356791.

[0028] Provided herein is an engineered human cell, which has reduced or eliminated surface expression of HLA-B protein relative to an unmodified cell, comprising a genetic modification in the HLA-B gene, wherein the genetic modification comprises at least one nucleotide within the genomic coordinates chosen from: (a) chr6:31355348-31355368; or (b) chr6:31355390-31355414; chr6:31355417-31355441; or chr6: 31356386-31356410.

[0029] Provided herein is an engineered human cell, which has reduced or eliminated surface expression of HLA-B protein relative to an unmodified cell, comprising a genetic modification in an HLA-B gene, wherein the genetic modification comprises an indel, a C to T substitution, or an A to G substitution within the genomic coordinates chosen from; chr6:31355182-31355202; chr6:31355348-31355368; chr6:31355145-31355165; chr6:31355349-31355369; chr6:31356381-31356401; chr6:31356380-31356400; chr6:31355204-31355224; chr6:31355205-31355225; chr6:31355191-31355211; chr6:31355192-31355212; chr6:31355193-31355213; chr6:31355198-31355218; chr6:31355320-31355340; chr6:31355319-31355339; chr6:31355347-31355367; chr6:31355432-31355452; chr6:31355340-31355360; chr6:31355410-31355430; chr6:31355414-31355434; or chr6:31355409-31355429.

[0030] Provided herein is an engineered human cell, which has reduced or eliminated surface expression of HLA-B protein relative to an unmodified cell, comprising a genetic modification in an HLA-B gene, wherein the genetic modification comprises an indel, a C to T substitution, or an A to G substitution within the genomic coordinates chosen from; chr6:31355182-31355202; chr6:31355349-31355369; chr6:31355348-31355368; or chr6:31355145-31355165.

[0031] Provided herein is an engineered human cell, which has reduced or eliminated surface expression of HLA-B protein relative to an unmodified cell, comprising a genetic modification in an HLA-B gene, wherein the genetic modification comprises an indel, a C to T substitution, or an A to G substitution within the genomic coordinates chosen from; chr6:31355348-31355368; chr6:31355349-31355369; chr6:31356381-31356401; chr6:31356380-31356400; chr6:31355204-31355224; chr6:31355205-31355225; chr6:31355191-31355211; chr6:31355192-31355212; chr6:31355193-31355213; chr6:31355198-31355218; chr6:31355320-31355340; chr6:31355319-31355339; chr6:31355182-31355202; chr6:31355178-31355198; chr6:31355347-31355367; chr6:31355145-31355165; chr6:31355432-31355452; chr6:31355340-31355360; or chr6:31355414-31355434.

[0032] Provided herein is an engineered human cell, which has reduced or eliminated surface expression of HLA-B protein relative to an unmodified cell, comprising a genetic modification in an HLA-B gene, wherein the genetic modification comprises an indel, a C to T substitution, or an A to G substitution within the genomic coordinates chosen from; chr6:31355348-31355368; chr6:31355349-31355369; chr6:31356381-31356401; chr6:31356380-31356400; chr6:31355205-31355225; chr6:31355191-31355211; chr6:31355192-31355212; chr6:31355193-31355213; chr6:31355198-31355218; chr6:31355320-31355340; chr6:31355319-31355339; chr6:31355182-31355202; chr6:31355178-31355198; chr6:31355347-31355367; chr6:31355145-31355165; chr6:31355432-31355452; chr6:31355340-31355360; chr6:31355410-31355430; chr6:31355414-31355434; or chr6:31355409-31355429.

[0033] Provided herein is an engineered human cell, which has reduced or eliminated surface expression of HLA-B protein relative to an unmodified cell, comprising a genetic modification in an HLA-B gene, wherein the genetic modification comprises an indel, a C to T substitution, or an A to G substitution within the genomic coordinates chosen from; chr6:31355348-31355368, chr6:31355349-31355369, chr6:31355192-31355212, chr6:31355347-31355367, chr6:31355340-31355360, chr6:31355409-31355429.

[0034] Provided herein is an engineered human cell, which has reduced or eliminated surface expression of HLA-B protein relative to an unmodified cell, comprising a genetic modification in an HLA-B gene, wherein the genetic modification comprises an indel, a C to T substitution, or an A to G substitution within the genomic coordinates chosen from; chr6:31355349-31355369 or chr6:31355348-31355368.

[0035] Provided herein is an engineered human cell, which has reduced or eliminated surface expression of HLA-B protein relative to an unmodified cell, comprising a genetic modification in an HLA-B gene, wherein the genetic modification comprises an indel, a C to T substitution, or an A to G substitution within the genomic coordinates chosen from; chr6:31355192-31355212 or chr6:31355347-31355367.

[0036] Provided herein is an engineered human cell, which has reduced or eliminated surface expression of HLA-B protein relative to an unmodified cell, comprising a genetic modification in an HLA-B gene, wherein the genetic modification comprises an indel, a C to T substitution, or an A to G substitution within the genomic coordinates chosen from; chr6:31355347-31355367; chr6:31355340-31355360; or chr6:31355409-31355429.

[0037] Provided herein is an engineered human cell, which has reduced or eliminated surface expression of HLA-B protein relative to an unmodified cell, comprising a genetic modification in an HLA-B gene, wherein the genetic modification comprises an indel, a C to T substitution, or an A to G substitution within the genomic coordinates chosen from; chr6:31355348-31355368; chr6:31355145-31355165; chr6:31355347-31355367; chr6:31355432-31355452; or chr6:31355340-31355360.

[0038] Provided herein is an engineered human cell, which has reduced or eliminated surface expression of HLA-B protein relative to an unmodified cell, comprising a genetic modification in an HLA-B gene, wherein the genetic modification comprises an indel, a C to T substitution, or an A to G substitution within the genomic coordinates chosen from; chr6:31355182-31355202; chr6:31355348-31355368; chr6:31355180-31355200; chr6:31355145-31355165; chr6:31355349-31355369; chr6:31355157-31355177; chr6:31356381-31356401; chr6:31356380-31356400; chr6:31355204-31355224; chr6:31355205-31355225; chr6:31355185-31355205; chr6:31355191-31355211; chr6:31355192-31355212; chr6:31355190-31355210; chr6:31355193-31355213; chr6:31355198-31355218; chr6:31355320-31355340; chr6:31355319-31355339; chr6:31355178-31355198; chr6:31355347-31355367; chr6:31355432-31355452; chr6:31355340-31355360; chr6:31355576-31355596; chr6:31355410-31355430; chr6:31355419-31355439; chr6:31355414-31355434; chr6:31355409-31355429.

[0039] Provided herein is an engineered human cell, which has reduced or eliminated surface expression of HLA-B protein relative to an unmodified cell, comprising a genetic modification in an HLA-B gene, wherein the genetic modification comprises an indel, a C to T substitution, or an A to G substitution within the genomic coordinates chosen from; chr6:31356777-31356801; chr6:31355492-31355516; chr6:31355379-31355403; chr6:31355491-31355515; chr6:31355361-31355385; chr6:31355356-31355380; chr6:31355460-31355484; chr6:31357078-31357102; chr6:31355417-31355441; chr6:31355366-31355390; chr6:31355415-31355439; chr6:31355378-31355402; chr6:31355166-31355190; chr6:31355401-31355425; chr6:31355469-31355493; chr6:31355221-31355245; chr6:31355222-31355246; chr6:31355205-31355229; chr6:31355446-31355470; chr6:31356425-31356449; chr6:31355441-31355465; chr6:31355203-31355227; chr6:31356437-31356461; chr6:31356426-31356450; chr6:31356763-31356787; or chr6:31356764-31356788.

[0040] Provided herein is an engineered human cell, which has reduced or eliminated surface expression of HLA-B protein relative to an unmodified cell, comprising a genetic modification in an HLA-B gene, wherein the genetic modification comprises an indel, a C to T substitution, or an A to G substitution within the genomic coordinates chosen from; chr6:31356777-31356801; chr6:31355492-31355516; chr6:31355361-31355385; chr6:31355379-31355403; chr6:31355491-31355515; chr6:31355356-31355380; chr6:31355366-31355390; chr6:31355417-31355441; chr6:31357078-31357102; chr6:31355460-31355484; chr6:31355415-31355439; chr6:31355166-31355190; chr6:31355378-31355402; chr6:31355401-31355425; chr6:31356262-31356286; chr6:31355221-31355245; chr6:31355222-31355246; chr6:31355205-31355229; chr6:31355446-31355470; chr6:31356425-31356449; chr6:31355441-31355465; chr6:31355203-31355227; chr6:31356437-31356461; chr6:31356426-31356450; chr6:31356763-31356787; or chr6:31356764-31356788.

[0041] Provided herein is an engineered human cell, which has reduced or eliminated surface expression of HLA-B protein relative to an unmodified cell, comprising a genetic modification in an HLA-B gene, wherein the genetic modification comprises an indel, a C to T substitution, or an A to G substitution within the genomic coordinates chosen from; chr6:31356777-31356801; chr6:31355492-31355516; chr6:31355379-31355403; chr6:31355491-31355515; chr6:31355361-31355385; chr6:31355356-31355380; chr6:31355460-31355484; chr6:31357078-31357102; chr6:31355417-31355441; chr6:31355366-31355390; chr6:31355221-31355245; chr6:31355222-31355246; chr6:31355205-31355229; chr6:31355446-31355470; chr6:31356425-31356449; chr6:31355441-31355465; chr6:31355203-31355227; chr6:31356437-31356461; or chr6:31356426-31356450.

[0042] Provided herein is an engineered human cell, which has reduced or eliminated surface expression of HLA-B protein relative to an unmodified cell, comprising a genetic modification in an HLA-B gene, wherein the genetic modification comprises an indel, a C to T substitution, or an A to G substitution within the genomic coordinates chosen from; chr6:31356777-31356801; chr6:31355492-31355516; chr6:31355379-31355403; chr6:31355491-31355515; chr6:31355361-31355385.

[0043] Provided herein is an engineered human cell, which has reduced or eliminated surface expression of HLA-B protein relative to an unmodified cell, comprising a genetic modification in an HLA-B gene, wherein the genetic modification comprises an indel, a C to T substitution, or an A to G substitution within the genomic coordinates chosen from; chr6:31356777-31356801; chr6:31355492-31355516; chr6:31355379-31355403; chr6:31355491-31355515; chr6:31355361-31355385; chr6:31355356-31355380; chr6:31355460-31355484; chr6:31357078-31357102; chr6:31355417-31355441; chr6:31355366-31355390; chr6:31355415-31355439; chr6:31355378-31355402; chr6:31355166-31355190; chr6:31355401-31355425; chr6:31355469-31355493; chr6:31356262-31356286; chr6:31355419-31355443; chr6:31355390-31355414; chr6:31355369-31355393; chr6:31355221-31355245; chr6:31355222-31355246; chr6:31355205-31355229; chr6:31355446-31355470; chr6:31356425-31356449; chr6:31355441-31355465; chr6:31355203-31355227; chr6:31356437-31356461; chr6:31356426-31356450; chr6:31356763-31356787; chr6:31356764-31356788; chr6:31356762-31356786; chr6:31355204-31355228; chr6:31356436-31356460; or chr6:31356767-31356791.

[0044] Provided herein is an engineered human cell, which has reduced or eliminated surface expression of HLA-B protein relative to an unmodified cell, comprising a genetic modification in an HLA-B gene, wherein the genetic modification comprises an indel, a C to T substitution, or an A to G substitution within the genomic coordinates chosen from: (a) chr6:31355348-31355368; or (b) chr6:31355390-31355414; chr6:31355417-31355441; or chr6: 31356386-31356410.

[0045] Provided herein is a method of making an engineered human cell, which has reduced or eliminated surface expression of HLA-B protein relative to an unmodified cell, wherein the cell is homozygous for HLA-A and homozygous for HLA-C, comprising contacting a cell with a composition comprising: (a) an HLA-B guide RNA comprising (i) a guide sequence selected from SEQ ID NOs: 1-91 and 101-185; or (ii) at least 17, 18, 19, or 20 contiguous nucleotides of a sequence selected from SEQ ID NOs: 1-91; or at least 17, 18, 19, 20, 21, 22, 23, or 24 contiguous nucleotides of a sequence selected from SEQ ID NOs: 101-185; or (iii) a guide sequence at least 95%, 90%, or 85% identical to a sequence selected from SEQ ID NOs: 1-91; or at least 95%, 90%, 85%, 80%, 75%, or 70% identical to a sequence selected from SEQ ID NOs: 101-185; or (iv) a guide sequence that binds a target site comprising a genomic region listed in Tables 2 or 3; or (v) a guide sequence that is complementary to at least 17, 18, 19, or 20 contiguous nucleotides of a genomic region listed in Table 2, or a guide sequence that is complementary to at least 17, 18, 19, 20, 21, 22, 23, or 24 contiguous nucleotides of a genomic region listed in Table 3; or (vi) a guide sequence that is at least 95%, 90%, or 85%, 80%, 75%, or 70% identical to a sequence selected from (v); and optionally (b) an RNA-guided DNA binding agent or a nucleic acid encoding an RNA-guided DNA binding agent.

[0046] Provided herein is a method of making an engineered human cell, which as reduced or eliminated surface expression of HLA-A and HLA-B protein relative to an unmodified cell, wherein the cell is homozygous for HLA-C, comprising contacting a cell with a first composition comprising (a) an HLA-A guide RNA comprising (i) a guide sequence selected from SEQ ID NOs: 301-590; or (ii) at least 17, 18, 19, or 20 contiguous nucleotides of a sequence selected from SEQ ID NOs: 301-428 and 463-511; or at least 17, 18, 19, 20, 21, 22, 23, or 24 contiguous nucleotides of a sequence selected from SEQ ID NOs 429-462 and 512-590; or (iii) a guide sequence at least 95%, 90%, or 85% identical to a sequence selected from SEQ ID NOs: 301-428 and 463-511; or at least 95%, 90%, 85%, 80%, 75%, or 70% identical to a sequence selected from SEQ ID NOs: 429-462 and 512-590; or (iv) a guide sequence that binds a target site comprising a genomic region listed in Tables 4-7; or (v) a guide sequence that is complementary to at least 17, 18, 19, or 20 contiguous nucleotides of a genomic region listed in Table 4, Table 5B or Table 6; or a guide sequence that is complementary to at least 17, 18, 19, 20, 21, 22, 23, or 24 contiguous nucleotides of a genomic region listed in Table 5A or Table 7; or (vi) a guide sequence that is at least 95%, 90%, 85%, 80%, 75%, or 70% identical to a sequence selected from (v); and optionally (b) a first RNA-guided DNA binding agent or a nucleic acid encoding an RNA-guided DNA binding agent; and contacting a cell with a second composition comprising (a) an HLA-B guide RNA comprising (i) a guide sequence selected from SEQ ID NOs: 1-91 and 101-185; or (ii) at least 17, 18, 19, or 20 contiguous nucleotides of a sequence selected from SEQ ID NOs: 1-91; or at least 17, 18, 19, 20, 21, 22, 23, or 24 contiguous nucleotides of a sequence selected from SEQ ID NOs: 101-185; or (iii) a guide sequence at least 95%, 90%, or 85% identical to a sequence selected from SEQ ID NOs: 1-91; or at least 95%, 90%, 85%, 80%, 75%, or 70% identical to a sequence selected from SEQ ID NOs: 101-185; or (iv) a guide sequence that binds a target site comprising a genomic region listed in Table 2 or 3; or (v) a guide sequence that is complementary to at least 17, 18, 19, or 20 contiguous nucleotides of a genomic region listed in Table 2, or a guide sequence that is complementary to at least 17, 18, 19, 20, 21, 22, 23, or 24 contiguous nucleotides of a genomic region listed in Table 3; or (vi) a guide sequence that is at least 95%, 90%, 85%, 80%, 75%, or 70% identical to a sequence selected from (v); and optionally (b) an RNA-guided DNA binding agent or a nucleic acid encoding an RNA-guided DNA binding agent.

[0047] Provided herein is a method of reducing surface expression of HLA-B protein in a human cell relative to an unmodified cell, comprising contacting a cell with composition comprising: (a) a HLA-B guide RNA comprising (i) a guide sequence selected from SEQ ID NOs: 1-91 and 101-185; or (ii) at least 17, 18, 19, or 20 contiguous nucleotides of a sequence selected from SEQ ID NOs: 1-91; or at least 17, 18, 19, 20, 21, 22, 23, or 24 contiguous nucleotides of a sequence selected from SEQ ID NOs: 101-185; or (iii) a guide sequence at least 95%, 90%, or 85% identical to a sequence selected from SEQ ID NOs: 1-91; or at least 95%, 90%, 85%, 80%, 75%, or 70% identical to a sequence selected from SEQ ID NOs: 101-185; or (iv) a guide sequence that binds a target site comprising a genomic region listed in Table 2 or 3; or (v) a guide sequence that is complementary to at least 17, 18, 19, or 20 contiguous nucleotides of a genomic region listed in Table 2, or a guide sequence that is complementary to at least 17, 18, 19, 20, 21, 22, 23, or 24 contiguous nucleotides of a genomic region listed in Table 3; or (vi) a guide sequence that is at least 95%, 90%, 85%, 80%, 75%, or 70% identical to a sequence selected from (v); and optionally (b) an RNA-guided DNA binding agent or a nucleic acid encoding an RNA-guided DNA binding agent.

[0048] Provided herein is a method of reducing surface expression of HLA-A and HLA-B protein in a human cell relative to an unmodified cell, comprising contacting a cell with composition comprising: contacting a cell with a first composition comprising (a) an HLA-A guide RNA comprising (i) a guide sequence selected from SEQ ID NOs: 301-590; or (ii) at least 17, 18, 19, or 20 contiguous nucleotides of a sequence selected from SEQ ID NOs: 301-428 and 463-511; or at least 17, 18, 19, 20, 21, 22, 23, or 24 contiguous nucleotides of a sequence selected from SEQ ID NOs: 429-462 and 512-590; or (iii) a guide sequence at least 95%, 90%, or 85% identical to a sequence selected from SEQ ID NOs: 301-428 and 463-511; or at least 95%, 90%, 85%, 80%, 75%, or 70% identical to a sequence selected from SEQ ID NOs: 429-462 and 512-590; or (iv) a guide sequence that binds a target site comprising a genomic region listed in Tables 4-7; or (v) a guide sequence that is complementary to at least 17, 18, 19, or 20 contiguous nucleotides of a genomic region listed in Table 4, 5B or 6; or a guide sequence that is complementary to at least 17, 18, 19, 20, 21, 22, 23, or 24 contiguous nucleotides of a genomic region listed in Table 5A or Table 7; or (vi) a guide sequence that is at least 95%, 90%, 85%, 80%, 75%, or 70% identical to a sequence selected from (v); and optionally (b) a first RNA-guided DNA binding agent or a nucleic acid encoding an RNA-guided DNA binding agent; and contacting a cell with a second composition comprising (a) an HLA-B guide RNA comprising (i) a guide sequence selected from SEQ ID NOs: 1-91 and 101-185; or (ii) at least 17, 18, 19, or 20 contiguous nucleotides of a sequence selected from SEQ ID NOs: 1-91; or at least 17, 18, 19, 20, 21, 22, 23, or 24 contiguous nucleotides of a sequence selected from SEQ ID NOs: 101-185; or (iii) a guide sequence at least 95%, 90%, or 85% identical to a sequence selected from SEQ ID NOs: 1-91; or at least 95%, 90%, 85%, 80%, 75%, or 70% identical to a sequence selected from SEQ ID NOs: 101-185; or (iv) a guide sequence that binds a target site comprising a genomic region listed in Table 2 or 3; or (v) a guide sequence that is complementary to at least 17, 18, 19, or 20 contiguous nucleotides of a genomic region listed in Table 2, or a guide sequence that is complementary to at least 17, 18, 19, 20, 21, 22, 23, or 24 contiguous nucleotides of a genomic region listed in Table 3; or (vi) a guide sequence that is at least 95%, 90%, 85%, 80%, 75%, or 70% identical to a sequence selected from (v); and optionally (b) an RNA-guided DNA binding agent or a nucleic acid encoding an RNA-guided DNA binding agent.

[0049] Provided herein is a method of administering an engineered cell to a recipient subject in need thereof, the method comprising: (a) determining the HLA-A and HLA-C alleles of the recipient subject; (b) selecting an engineered cell or cell population of any one of the preceding embodiments, or engineered cell or cell population produced by the method of any one of the preceding embodiments, wherein the engineered cell comprises at least one of the same HLA-A or HLA-C alleles as the recipient subject; (c) administering the selected engineered cell to the recipient subject.

[0050] Provided herein is a method of administering an engineered cell to a recipient subject in need thereof, the method comprising (a) determining the HLA-C alleles of the recipient subject; (b) selecting an engineered cell or cell population of any one of the preceding embodiments, or engineered cell or cell population produced by the method of any one of the preceding embodiments, wherein the engineered cell comprises at least one of the same HLA-C alleles as the recipient subject; (c) administering the selected engineered cell to the recipient subject.

[0051] Further embodiments are provided throughout and described in the claims and Figures.

### IV. BRIEF DESCRIPTION OF THE DRAWINGS

[0052] FIG. 1 shows the mean percentage of cells negative for HLA-B7 following editing at the HLA-B locus using 100-mer Spy guides.

[0053] FIG. 2 shows the percentage of T cell lysis following NK cell challenge after editing with various Spy sgRNAs.

[0054] FIGS. 3A-3E show the mean percentage of cells negative for HLA-B following editing at the HLA-B locus. FIG. 3A-3C show the mean percentage of HLA-B-cells across three donors in 100-mer Spy guides and four 91-mer Spy guides. FIG. 3D-3E show the mean percentage of HLA-B-cells across two donors in 91-mer Spy guides following editing at the HLA-B locus.

[0055] FIGS. 4A-B show the mean percentage of HLA-B knockout. FIG. 4A shows the mean percentage of HLA-B*07:02 knockout and FIG. 4B shows the mean percentage of HLA*B08:01 knockout.

[0056] FIGS. 5A-C shows the mean percentage of cells negative for HLA-B7 following editing at the HLA-B locus with various Nine sgRNAs. FIG. 5A shows HLA-B7 negative cells in cells with Nme2 BC22n guides. FIGS. 5B-C show HLA-B7 negative cells in cells treated with Nme2 Cleavase guides. FIG. 5B shows the mean percentage of HLA-B*07:02 knockout and FIG. 5C shows the mean percentage of HLA-B*08:01 knockout.

[0057] FIG. 6 shows the dose response curve for the percent of HLA-A2− of CD8+ cells with various doses of Nine sgRNA following editing at the HLA-B locus.

[0058] FIG. 7 shows the dose response curve for the percent of HLA-B7− of CD8+ cells with various doses of Nine sgRNA following editing at the HLA-B locus.

[0059] FIG. 8A shows the mean percentage of cells negative for HLA-B7 following editing using candidate guides at the HLA-B locus with an Nme2 base editor (deaminase, also referred to as BC22n). G028907 was used as a control.

[0060] FIG. 8B shows the mean percentage of cells negative for and HLA-B8 following editing using candidate guides at the HLA-B locus with an Nme2 base editor (deaminase, also referred to as BC22n). G028907 was used as a control.

[0061] FIG. 9 shows the percentage of T cell lysis following NK cell challenge to engineered T cells with HLA-A, HLA-B, or HLA-A/B knockout.

[0062] FIGS. 10A-10D show the percent editing at each sgRNA dose in either HLA-B homozygous or heterozygous donors. FIG. 10A shows percent of HLA-B7− and CD8+ cells in an HLA-B7 homozygous donor. FIG. 10B shows percent of HLA-B8− and CD8+ cells in an HLA-B7 homozygous donor. FIG. 10C shows percent of HLA-B7− and CD8+ cells in an HLA-B7 heterozygous donor. FIG. 10D shows percent of HLA-B8− and CD8+ cells in an HLA-B7 heterozygous donor.

[0063] FIG. 11 shows the total flux (photons/s) from luciferase expressing T cells present at the various time points after injection for cells edited with HLA-A, HLA-B, CIITA, TRAC, and/or B2M.

[0064] FIG. 12 shows the total flux (photons/s) from luciferase expressing T cells present at the various time points after injection for cells edited with HLA-A, HLA-B, CIITA, TRAC, and/or B2M.

[0065] FIGS. 13A and 13B show the percentage killing results in tumor cells. FIG. 13A shows the percentage killing results in HH cells for double and triple KO edits. FIG. 13B shows the percentage killing results in MOLT-4 cells for double and triple KO edits.

[0066] FIG. 14 shows the % T cell killing results with NK cells for T cells with different edits or controls of B2M/CIITA KO, unedited, or untransduced T cells.

[0067] FIGS. 15A and 15B show the percentage of host T cell proliferation when co-cultured with engineered donor T cells.

### V. DETAILED DESCRIPTION

[0068] The present disclosure provides engineered human cells, as well as methods and compositions for genetically modifying a human cell to make engineered human cells that are useful, for example, for adoptive cell transfer (ACT) therapies. The disclosure provides engineered human cells with reduced or eliminated surface expression of HLA-B protein relative to an unmodified cell, wherein the cell is homozygous for HLA-A and homozygous for HLA-C. Additionally, the disclosure provides engineered human cells with reduced or eliminated surface expression of HLA-A and HLA-B protein relative to an unmodified cell, wherein the cell is homozygous for HLA-C. Thus, the engineered human cells disclosed herein provide a “partial matching” solution to hurdles associated with allogeneic cell transfer.

[0069] In some embodiments, the disclosure provides engineered human cells with reduced or eliminated surface expression of HLA-B protein as a result of a genetic modification in the HLA-B gene, wherein the cell is homozygous for HLA-A and HLA-C. In some embodiments, the disclosure provides compositions and methods for reducing or eliminating expression of HLA-B protein relative to an unmodified cell and compositions and methods to reduce the cell's susceptibility to immune rejection. In some embodiments, the engineered human cells with reduced or eliminated surface expression of HLA-B protein relative to an unmodified cell are not susceptible to lysis by NK cells, a problem observed with other approaches that reduce or eliminate MHC class I protein expression. In some embodiments, the methods and compositions comprise reducing or eliminating surface expression of HLA-B protein by genetically modifying HLA-B with a gene editing system, and inserting an exogenous nucleic acid encoding a targeting receptor, or other polypeptide (expressed on the cell surface or secreted) into the cell by genetic modification. The engineered cell compositions produced by the methods disclosed herein have desirable properties, including e.g., reduced or eliminated expression of HLA-B, reduced immunogenicity in vitro and in vivo, increased survival, and increased genetic compatibility with greater subjects for transplant.

[0070] In some embodiments, the disclosure provides engineered human cells with reduced or eliminated surface expression of HLA-A and HLA-B protein as a result of a genetic modification in the HLA-A and HLA-B genes, wherein the cell is homozygous for HLA-C. In some embodiments, the disclosure provides compositions and methods for reducing or eliminating expression of HLA-A and HLA-B protein relative to an unmodified cell and compositions and methods to reduce the cell's susceptibility to immune rejection. In some embodiments, the engineered human cells with reduced or eliminated surface expression of HLA-A and HLA-B protein relative to an unmodified cell are not susceptible to lysis by NK cells, a problem observed with other approaches that reduce or eliminate MHC class I protein expression. In some embodiments, the methods and compositions comprise reducing or eliminating surface expression of HLA-A and HLA-B protein by genetically modifying HLA-A and HLA-B with a gene editing system, and inserting an exogenous nucleic acid encoding a targeting receptor, or other polypeptide (expressed on the cell surface or secreted) into the cell by genetic modification. The engineered cell compositions produced by the methods disclosed herein have desirable properties, including e.g., reduced or eliminated surface expression of HLA-A and HLA-B protein, reduced immunogenicity in vitro and in vivo, increased survival, and increased genetic compatibility with greater subjects for transplant.

[0071] The term “about” or “approximately” means an acceptable error for a particular value as determined by one of ordinary skill in the art, which depends in part on how the value is measured or determined, or a degree of variation that does not substantially affect the properties of the described subject matter, or within the tolerances accepted in the art, e.g., within 10%, 5%, 2%, or 1%. Accordingly, unless indicated to the contrary, the numerical parameters set forth in the following specification and attached claims are approximations that may vary depending upon the desired properties sought to be obtained. At the very least, and not as an attempt to limit the application of the doctrine of equivalents to the scope of the claims, each numerical parameter should at least be construed in light of the number of reported significant digits and by applying ordinary rounding techniques.

[0072] Provided herein are the following numbered embodiments:

[0073] Embodiment 1 is an engineered human cell, which has reduced or eliminated surface expression of HLA-A and HLA-B protein relative to an unmodified cell, comprising a genetic modification in the HLA-A gene and a genetic modification in the HLA-B gene, wherein the cell is homozygous for HLA-C.

[0074] Embodiment 2 is an engineered human cell, which has reduced or eliminated surface expression of HLA-A and HLA-B protein relative to an unmodified cell, comprising a genetic modification in the HLA-A gene and a genetic modification in the HLA-B gene, wherein (i) the genetic modification in the HLA-A gene comprises at least one nucleotide within the genomic coordinates chosen from: (a) chr6:29942854-chr6:29942913 and chr6:29943518-chr6:29943619; and (b) chr6:29942540-29945459; (ii) the genetic modification in the HLA-B gene comprises at least one nucleotide within the genomic coordinates chosen from: (a) chr6:31354480-31357174 or (b) chr6: 31354497-31357157; wherein the cell is homozygous for HLA-C.

[0075] Embodiment 3 is an engineered human cell, which has reduced or eliminated surface expression of HLA-B protein relative to an unmodified cell, comprising a genetic modification in the HLA-B gene, wherein the cell is homozygous for HLA-A and homozygous for HLA-C.

[0076] Embodiment 4 is an engineered human cell, which has reduced or eliminated surface expression of HLA-B protein relative to an unmodified cell, comprising a genetic modification in the HLA-B gene, wherein the genetic modification comprises at least one nucleotide within the genomic coordinates chosen from: (a) chr6:31354480-31357174 or (b) chr6: 31354497-31357157; wherein the cell is homozygous for HLA-A and homozygous for HLA-C.

[0077] Embodiment 5 is the engineered human cell of any one of embodiments 1-4, wherein the cell has reduced or eliminated expression of at least one HLA-B allele selected from HLA-B7, HLA-B8, HLA-B35, HLA-B40, HLA-B44, HLA-B15, HLA-B14, HLA-B18 and HLA-B51.

[0078] Embodiment 6 is the engineered human cell of any one of embodiments 1, 2, or 5, wherein the cell has reduced or eliminated expression of at least one HLA-A allele selected from: HLA-A1, HLA-A2, HLA-A3, HLA-AT1, HLA-A29, HLA-A26, HLA-A33, and HLA-A24.

[0079] Embodiment 7 is the engineered cell of any one of embodiments 1-6, wherein the genetic modification in the HLA-B gene comprises at least one nucleotide within the genomic coordinates chosen from: (a) chr6:31355182-31355596 or (b) chr6: 31355203-31356461.

[0080] Embodiment 8 is the engineered cell of any one of embodiments 1-7, wherein the genetic modification in the HLA-B comprises at least one nucleotide within the genomic coordinates chosen from: (a) chr6:31355182-31355202; chr6:31355348-31355368; chr6:31355180-31355200; chr6:31355145-31355165; chr6:31355349-31355369; chr6:31355157-31355177; chr6:31356381-31356401; chr6:31356380-31356400; chr6:31355204-31355224; chr6:31355205-31355225; chr6:31355185-31355205; chr6:31355191-31355211; chr6:31355192-31355212; chr6:31355190-31355210; chr6:31355193-31355213; chr6:31355198-31355218; chr6:31355320-31355340; chr6:31355319-31355339; chr6:31355178-31355198; chr6:31355347-31355367; chr6:31355432-31355452; chr6:31355340-31355360; chr6:31355576-31355596; chr6:31355410-31355430; chr6:31355419-31355439; chr6:31355414-31355434; or chr6:31355409-31355429; or (b) chr6:31356777-31356801; chr6:31355492-31355516; chr6: 31355379-31355403; chr6:31355491-31355515; chr6:31355361-31355385; chr6:31355356-31355380; chr6:31355460-31355484; chr6:31357078-31357102; chr6:31355417-31355441; chr6:31355366-31355390; chr6:31355415-31355439; chr6:31355378-31355402; chr6:31355166-31355190; chr6:31355401-31355425; ch6:31355469-31355493; chr6:31356262-31356286; chr6:31355419-31355443; chr6:31355390-31355414; chr6:31355369-31355393; chr6:31355221-31355245; chr6:31355222-31355246; chr6:31355205-31355229; chr6:31355446-31355470; chr6:31356425-31356449; chr6:31355441-31355465; chr6:31355203-31355227; chr6:31356437-31356461; chr6:31356426-31356450; chr6:31356763-31356787; chr6:31356764-31356788; chr6:31356762-31356786; chr6:31355204-31355228; chr6:31356436-31356460; or chr6:31356767-31356791.

[0081] Embodiment 9 is the engineered cell of any of embodiments 1-8, wherein the genetic modification in the HLA-B comprises at least one nucleotide within the genomic coordinates chosen from: chr6:31355182-31355202; chr6:31355348-31355368; chr6:31355145-31355165; chr6:31355349-31355369; chr6:31356381-31356401; chr6:31356380-31356400; chr6:31355204-31355224; chr6:31355205-31355225; chr6:31355191-31355211; chr6:31355192-31355212; chr6:31355193-31355213; chr6:31355198-31355218; chr6:31355320-31355340; chr6:31355319-31355339; chr6:31355347-31355367; chr6:31355432-31355452; chr6:31355340-31355360; chr6:31355410-31355430; chr6:31355414-31355434; or chr6:31355409-31355429.

[0082] Embodiment 10 is the engineered cell of any of embodiments 1-9, wherein the genetic modification in the HLA-B comprises at least one nucleotide within the genomic coordinates chosen from: chr6:31355182-31355202; chr6:31355349-31355369; chr6:31355348-31355368; or chr6:31355145-31355165.

[0083] Embodiment 11 is the engineered cell of any of embodiments 1-10, wherein the genetic modification in the HLA-B comprises at least one nucleotide within the genomic coordinates chosen from: chr6:31355348-31355368; chr6:31355349-31355369; chr6:31356381-31356401; chr6:31356380-31356400; chr6:31355204-31355224; chr6:31355205-31355225; chr6:31355191-31355211; chr6:31355192-31355212; chr6:31355193-31355213; chr6:31355198-31355218; chr6:31355320-31355340; chr6:31355319-31355339; chr6:31355182-31355202; chr6:31355178-31355198; chr6:31355347-31355367; chr6:31355145-31355165; chr6:31355432-31355452; chr6:31355340-31355360; or chr6:31355414-31355434.

[0084] Embodiment 12 is the engineered cell of any of embodiments 1-11, wherein the genetic modification in the HLA-B comprises at least one nucleotide within the genomic coordinates chosen from: chr6:31355348-31355368; chr6:31355349-31355369; chr6:31356381-31356401; chr6:31356380-31356400; chr6:31355205-31355225; chr6:31355191-31355211; chr6:31355192-31355212; chr6:31355193-31355213; chr6:31355198-31355218; chr6:31355320-31355340; chr6:31355319-31355339; chr6:31355182-31355202; chr6:31355178-31355198; chr6:31355347-31355367; chr6:31355145-31355165; chr6:31355432-31355452; chr6:31355340-31355360; chr6:31355410-31355430; chr6:31355414-31355434; or chr6:31355409-31355429.

[0085] Embodiment 13 is the engineered cell of any of embodiments 1-12, wherein the genetic modification in the HLA-B comprises at least one nucleotide within the genomic coordinates chosen from: chr6:31355348-31355368, chr6:31355347-31355367, chr6:31355349-31355369, chr6:31355192-31355212, chr6:31355340-31355360, chr6:31355409-31355429.

[0086] Embodiment 14 is the engineered cell of any of embodiments 1-13, wherein the genetic modification in the HLA-B comprises at least one nucleotide within the genomic coordinates chosen from: (i) chr6:31355349-31355369 or chr6:31355348-31355368; (ii) chr6:31355192-31355212 or chr6:31355347-31355367; (iii) chr6:31355347-31355367; chr6:31355340-31355360; or chr6:31355409-31355429; or (iv) chr6:31355348-31355368; chr6:31355145-31355165; chr6:31355347-31355367; chr6:31355432-31355452; or chr6:31355340-31355360.

[0087] Embodiment 15 is the engineered cell of any of embodiments 1-14, wherein the genetic modification in the HLA-B comprises at least one nucleotide within the genomic coordinates chosen from: chr6:31356777-31356801; chr6:31355492-31355516; chr6: 31355379-31355403; chr6:31355491-31355515; chr6:31355361-31355385; chr6:31355356-31355380; chr6:31355460-31355484; chr6:31357078-31357102; chr6:31355417-31355441; chr6:31355366-31355390; chr6:31355415-31355439; chr6:31355378-31355402; chr6:31355166-31355190; chr6:31355401-31355425; ch6:31355469-31355493; chr6:31355221-31355245; chr6:31355222-31355246; chr6:31355205-31355229; chr6:31355446-31355470; chr6:31356425-31356449; chr6:31355441-31355465; chr6:31355203-31355227; chr6:31356437-31356461; chr6:31356426-31356450; chr6:31356763-31356787; or chr6:31356764-31356788.

[0088] Embodiment 16 is the engineered cell of any of embodiments 1-15, wherein the genetic modification in the HLA-B comprises at least one nucleotide within the genomic coordinates chosen from: chr6:31356777-31356801; chr6:31355492-31355516; chr6:31355361-31355385; chr6:31355379-31355403; chr6:31355491-31355515; chr6:31355356-31355380; chr6:31355366-31355390; chr6:31355417-31355441; chr6:31357078-31357102; chr6:31355460-31355484; chr6:31355415-31355439; chr6:31355166-31355190; chr6:31355378-31355402; chr6:31355401-31355425; chr6:31356262-31356286; chr6:31355221-31355245; chr6:31355222-31355246; chr6:31355205-31355229; chr6:31355446-31355470; chr6:31356425-31356449; chr6:31355441-31355465; chr6:31355203-31355227; chr6:31356437-31356461; chr6:31356426-31356450; chr6:31356763-31356787; or chr6:31356764-31356788.

[0089] Embodiment 17 is the engineered cell of any of embodiments 1-16, wherein the genetic modification in the HLA-B comprises at least one nucleotide within the genomic coordinates chosen from: chr6:31356777-31356801; chr6:31355492-31355516; chr6:31355379-31355403; ch6:31355491-31355515; chr6:31355361-31355385; chr6:31355356-31355380; chr6:31355460-31355484; chr6:31357078-31357102; chr6:31355417-31355441; chr6:31355366-31355390; chr6:31355221-31355245; chr6:31355222-31355246; chr6:31355205-31355229; chr6:31355446-31355470; chr6:31356425-31356449; chr6:31355441-31355465; chr6:31355203-31355227; chr6:31356437-31356461; or chr6:31356426-31356450.

[0090] Embodiment 18 is the engineered cell of any of embodiments 1-17, wherein the genetic modification in the HLA-B comprises at least one nucleotide within the genomic coordinates chosen from: chr6:31356777-31356801; chr6:31355492-31355516; chr6:31355379-31355403; ch6:31355491-31355515; chr6:31355361-31355385; chr6:31355221-31355245; chr6:31355222-31355246; chr6:31355205-31355229; chr6:31355446-31355470; chr6:31356425-31356449; or chr6:31355441-31355465.

[0091] Embodiment 19 is the engineered cell of any of embodiments 1-18, wherein the genetic modification in the HLA-B comprises at least one nucleotide within the genomic coordinates chosen from: chr6:31355221-31355245; chr6:31355222-31355246; chr6:31355205-31355229; chr6:31355446-31355470; chr6:31356425-31356449; or chr6:31355441-31355465.

[0092] Embodiment 20 is the engineered cell of any one of embodiments 1-19, wherein the genetic modification in the HLA-B comprises at least one nucleotide within the genomic coordinates chosen from: (a) chr6:31355348-31355368; or (b) chr6:31355390-31355414; chr6:31355417-31355441; or chr6: 31356386-31356410.

[0093] Embodiment 21 is the engineered cell of any one of embodiments 1-2 and 5-20, wherein the genetic modification in HLA-A comprises at least one nucleotide within the genomic coordinates chosen from: chr6:29942864-29942884; chr6:29942868-29942888; chr6:29942876-29942896; chr6:29942877-29942897; and chr6:29942883-29942903.

[0094] Embodiment 22 is the engineered cell of any one of embodiments 1-2 and 5-21, wherein the genetic modification in HLA-A comprises at least one nucleotide within the genomic coordinates chosen from: chr6:29942891-29942915; chr6:29942609-29942633; chr6:29942864-29942884; chr6:29944266-29944290; chr6:29942889-29942913; chr6:29942891-29942915chr6:29944471-29944495; chr6:29944470-29944494.

[0095] Embodiment 23 is the engineered cell of any one of embodiments 1-2 and 5-22, wherein the genetic modification in HLA-A comprises at least one nucleotide within the genomic coordinates chosen from: chr6:29942891-29942915; chr6:29942609-29942633.

[0096] Embodiment 24 is an engineered human cell, which has reduced or eliminated surface expression of HLA-B protein relative to an unmodified cell, comprising a genetic modification in the HLA-B gene, wherein the genetic modification comprises an indel, a C to T substitution, or an A to G substitution within the genomic coordinates chosen from: (a) chr6:31355348-31355368; or chr6:31355347-31355367; chr6:31355182-31355202; chr6:31355180-31355200; chr6:31355145-31355165; chr6:31355349-31355369; chr6:31355157-31355177; chr6:31356381-31356401; chr6:31356380-31356400; chr6:31355204-31355224; chr6:31355205-31355225; chr6:31355185-31355205; chr6:31355191-31355211; chr6:31355192-31355212; chr6:31355190-31355210; chr6:31355193-31355213; chr6:31355198-31355218; chr6:31355320-31355340; chr6:31355319-31355339; chr6:31355178-31355198; chr6:31355432-31355452; chr6:31355340-31355360; chr6:31355576-31355596; chr6:31355410-31355430; chr6:31355419-31355439; chr6:31355414-31355434; or chr6:31355409-31355429; or (b) chr6:31355221-31355245; chr6:31355222-31355246; chr6:31355205-31355229; chr6:31355446-31355470; chr6:31356425-31356449; chr6:31355441-31355465; chr6:31356777-31356801; chr6:31355492-31355516; chr6: 31355379-31355403; chr6:31355491-31355515; chr6:31355361-31355385; chr6:31355356-31355380; chr6:31355460-31355484; chr6:31357078-31357102; chr6:31355417-31355441; chr6:31355366-31355390; chr6:31355415-31355439; chr6:31355378-31355402; chr6:31355166-31355190; chr6:31355401-31355425; ch6:31355469-31355493; chr6:31356262-31356286; chr6:31355419-31355443; chr6:31355390-31355414; chr6:31355369-31355393; chr6:31355203-31355227; chr6:31356437-31356461; chr6:31356426-31356450; chr6:31356763-31356787; chr6:31356764-31356788; chr6:31356762-31356786; chr6:31355204-31355228; chr6:31356436-31356460; or chr6:31356767-31356791.

[0097] Embodiment 25 is an engineered human cell, which has reduced or eliminated surface expression of HLA-A and HLA-B protein relative to an unmodified cell, comprising (i) a genetic modification in the HLA-A gene comprising an indel, a C to T substitution, or an A to G substitution within the genomic coordinates chosen from: (a) chr6:29942864-29942884; chr6:29942868-29942888; chr6:29942876-29942896; chr6:29942877-29942897; chr6:29942883-29942903; chr6:29943126-29943146; chr6:29943528-29943548; chr6:29943529-29943549; chr6:29943530-29943550; chr6:29943537-29943557; chr6:29943549-29943569; chr6:29943589-29943609; chr6:29944026-29944046; chr6:29934330-29934350, chr6:29943115-29943135, chr6:29943135-29943155, chr6:29943140-29943160, chr6:29943590-29943610, chr6:29943824-29943844, chr6:29943858-29943878, chr6:29944478-29944498, and chr6:29944850-29944870; or (b) chr6:29942891-29942915; chr6:29942609-29942633; chr6:29944266-29944290; chr6:29942889-29942913; chr6:29944471-29944495; and chr6:29944470-29944494; and (ii) a genetic modification in the HLA-B gene comprising an indel, a C to T substitution, or an A to G substitution within the genomic coordinates chosen from: (a) chr6:31355348-31355368; or chr6:31355347-31355367; chr6:31355182-31355202; chr6:31355180-31355200; chr6:31355145-31355165; chr6:31355349-31355369; chr6:31355157-31355177; chr6:31356381-31356401; chr6:31356380-31356400; chr6:31355204-31355224; chr6:31355205-31355225; chr6:31355185-31355205; chr6:31355191-31355211; chr6:31355192-31355212; chr6:31355190-31355210; chr6:31355193-31355213; chr6:31355198-31355218; chr6:31355320-31355340; chr6:31355319-31355339; chr6:31355178-31355198; chr6:31355432-31355452; chr6:31355340-31355360; chr6:31355576-31355596; chr6:31355410-31355430; chr6:31355419-31355439; chr6:31355414-31355434; and chr6:31355409-31355429; or (b) chr6:31355221-31355245; chr6:31355222-31355246; chr6:31355205-31355229; chr6:31355446-31355470; chr6:31356425-31356449; chr6:31355441-31355465; chr6:31356777-31356801; chr6:31355492-31355516; chr6: 31355379-31355403; chr6:31355491-31355515; chr6:31355361-31355385; chr6:31355356-31355380; chr6:31355460-31355484; chr6:31357078-31357102; chr6:31355417-31355441; chr6:31355366-31355390; chr6:31355415-31355439; chr6:31355378-31355402; chr6:31355166-31355190; chr6:31355401-31355425; ch6:31355469-31355493; chr6:31356262-31356286; chr6:31355419-31355443; chr6:31355390-31355414; chr6:31355369-31355393; chr6:31355203-31355227; chr6:31356437-31356461; chr6:31356426-31356450; chr6:31356763-31356787; chr6:31356764-31356788; chr6:31356762-31356786; chr6:31355204-31355228; chr6:31356436-31356460; or chr6:31356767-31356791.

[0098] Embodiment 26 is the engineered cell of any one of embodiment 24 or 25, wherein the genetic modification in the HLA-B comprises an indel, a C to T substitution, or an A to G substitution within the genomic coordinates chosen from: (a) chr6:31355348-31355368; or (b) chr6:31355390-31355414; chr6:31355417-31355441; or chr6: 31355390-31355414.

[0099] Embodiment 27 is the engineered cell of any one of embodiments 24-26, wherein the genetic modification in the HLA-A or the genetic modification in the HLA-B comprises at least 2, at least 3, at least 4, at least 5, at least 6, at least 7, at least 8, at least 9, or at least 10 contiguous nucleotides within the genomic coordinates, or wherein the genetic modification comprises at least 5 contiguous nucleotides within the genomic coordinates.

[0100] Embodiment 28 is the engineered cell of any one of embodiments 24-27, wherein the genetic modification in the HLA-A or the genetic modification in the HLA-B comprises at least 6, 7, 8, 9, or 10 contiguous nucleotides within the genomic coordinates.

[0101] Embodiment 29 is the engineered cell of any one of embodiments 24-28, wherein the genetic modification in the HLA-A or the genetic modification in the HLA-B comprises at least one C to T substitution or at least one A to G substitution within the genomic coordinates.

[0102] Embodiment 30 is the engineered cell of any one of embodiments 1-29, wherein the HLA-B expression is reduced or eliminated by a gene editing system that binds to an HLA-B genomic target sequence comprising at least 5 contiguous nucleotides within the genomic coordinates chosen from: chr6:31355348-31355368; or chr6:31355347-31355367; chr6:31355182-31355202; chr6:31355348-31355368; chr6:31355180-31355200; chr6:31355145-31355165; chr6:31355349-31355369; chr6:31355157-31355177; chr6:31356381-31356401; chr6:31356380-31356400; chr6:31355204-31355224; chr6:31355205-31355225; chr6:31355185-31355205; chr6:31355191-31355211; chr6:31355192-31355212; chr6:31355190-31355210; chr6:31355193-31355213; chr6:31355198-31355218; chr6:31355320-31355340; chr6:31355319-31355339; chr6:31355178-31355198; chr6:31355347-31355367; chr6:31355432-31355452; chr6:31355340-31355360; chr6:31355576-31355596; chr6:31355410-31355430; chr6:31355419-31355439; chr6:31355414-31355434; chr6:31355409-31355429.

[0103] Embodiment 31 is the engineered cell of any one of embodiments 1-30, wherein the HLA-B expression is reduced or eliminated by a gene editing system that binds to an HLA-B genomic target sequence comprising at least 5 contiguous nucleotides within the genomic coordinates chosen from: chr6:31355221-31355245; chr6:31355222-31355246; chr6:31355205-31355229; chr6:31355446-31355470; chr6:31356425-31356449; chr6:31355441-31355465; chr6:31356777-31356801; chr6:31355492-31355516; chr6: 31355379-31355403; chr6:31355491-31355515; chr6:31355361-31355385; chr6:31355356-31355380; chr6:31355460-31355484; chr6:31357078-31357102; chr6:31355417-31355441; chr6:31355366-31355390; chr6:31355415-31355439; chr6:31355378-31355402; chr6:31355166-31355190; chr6:31355401-31355425; ch6:31355469-31355493; chr6:31356262-31356286; chr6:31355419-31355443; chr6:31355390-31355414; chr6:31355369-31355393; chr6:31355203-31355227; chr6:31356437-31356461; chr6:31356426-31356450; chr6:31356763-31356787; chr6:31356764-31356788; chr6:31356762-31356786; chr6:31355204-31355228; chr6:31356436-31356460; or chr6:31356767-31356791.

[0104] Embodiment 32 is the engineered cell of any one of embodiments 1-2, 5-23, and 25-31, wherein HLA-A expression is reduced or eliminated by a gene editing system that binds to an HLA-A genomic target sequence comprising at least 5 contiguous nucleotides within the genomic coordinates chosen from: chr6:29942891-29942915; chr6:29942609-29942633; chr6:29942864-29942884; chr6:29942868-29942888; chr6:29942876-29942896; chr6:29942877-29942897; chr6:29942883-29942903; chr6:29943126-29943146; chr6:29943528-29943548; chr6:29943529-29943549; chr6:29943530-29943550; chr6:29943537-29943557; chr6:29943549-29943569; chr6:29943589-29943609; chr6:29944026-29944046; chr6:29934330-29934350, chr6:29943115-29943135, chr6:29943135-29943155, chr6:29943140-29943160, chr6:29943590-29943610, chr6:29943824-29943844, chr6:29943858-29943878, and chr6:29944478-29944498, chr6:29944850-29944870.

[0105] Embodiment 33 is the engineered cell of any one of embodiments 1, 2, 5-23, and 25-32, wherein HLA-A expression is reduced or eliminated by a gene editing system that binds to an HLA-A genomic target sequence comprising at least 5 contiguous nucleotides within the genomic coordinates chosen from: chr6:29942891-29942915; chr6:29942609-29942633; chr6:29944266-29944290; chr6:29942889-29942913; chr6:29944471-29944495; and chr6:29944470-29944494.

[0106] Embodiment 34 is the engineered cell of any one of embodiments 1, 2, 5-23, and 25-33, wherein HLA-A expression is reduced or eliminated by a gene editing system that binds to an HLA-A genomic target sequence comprising at least 5 contiguous nucleotides within the genomic coordinates chosen from: chr6:29942891-29942915 or chr6:29942609-29942633.

[0107] Embodiment 35 is the engineered cell of any one of embodiments 30-34, wherein the HLA-A genomic target sequence or the HLA-B genomic target sequence comprises at least 10 contiguous nucleotides within the genomic coordinates.

[0108] Embodiment 36 is the engineered cell of any one of embodiments 30-35, wherein the HLA-A genomic target sequence or the HLA-B genomic target sequence comprises at least 15 contiguous nucleotides within the genomic coordinates.

[0109] Embodiment 37 is the engineered cell of any one of embodiments 30-36, wherein the HLA-A genomic target sequence or the HLA-B genomic target sequence comprises at least 17, 18, 19, or 20 contiguous nucleotides within the genomic coordinates.

[0110] Embodiment 38 is the engineered cell of any one of embodiments 30-36, wherein the HLA-A genomic target sequence or the HLA-B genomic target sequence comprises at least 17, 18, 19, 20, 21, 22, 23, 24 or 25 contiguous nucleotides within the genomic coordinates.

[0111] Embodiment 39 is the engineered cell of any one of embodiments 1-38, wherein the cell is homozygous for HLA-C.

[0112] Embodiment 40 is the engineered cell of any one of embodiments 1-39, wherein the HLA-C allele is selected from any one of the following HLA-C alleles: HLA-C*07:02; HLA-C*07:01; HLA-C*05:01; HLA-C*04:01 HLA-C*03:04; HLA-C*06:02; HLA-C*08:02; HLA-C*08:01; HLA-C*03:02; HLA-C*06:02; HLA-C*16:01; HLA-C*12:03; HLA-C*04:01; HLA-C*15:02; HLA-C*07:01; HLA-C*03:04; HLA-C*12:03; HLA-C*02:10; HLA-C*05:01; HLA-C*12:02; HLA-C*14:02; HLA-C*06:02; HLA-C*04:01; HLA-C*03:03; HLA-C*07:04; HLA-C*07:04; HLA-C*04:01; HLA-C*17:01; HLA-C*01:02; and HLA-C*02:02.

[0113] Embodiment 41 is the engineered cell of any one of embodiments 1-40, wherein the HLA-C allele is HLA-C*07:02.

[0114] Embodiment 42 is the engineered cell of any one of embodiments 1-40, wherein the HLA-C allele is HLA-C*07:01.

[0115] Embodiment 43 is the engineered cell of any one of embodiments 1-40, wherein the HLA-C allele is HLA-C*05:01.

[0116] Embodiment 44 is the engineered cell of any one of embodiments 1-40, wherein the HLA-C allele is HLA-C*04:01.

[0117] Embodiment 45 is the engineered cell of any one of embodiments 1-40, wherein the HLA-C allele is HLA-C*06:02.

[0118] Embodiment 46 is the engineered cell of any one of embodiments 3-24 and 26-45, wherein the engineered cell is homozygous for HLA-A, the HLA-A allele is selected from any one of the following HLA-A alleles: HLA-A*02:01; HLA-A*01:01; HLA-A*03:01; HLA-A*11:01; HLA-A*26:01; HLA-A*68:01; HLA-A*29:02; HLA-A*31:01; HLA-A*32:01; HLA-A*30:02; HLA-A*25:01; HLA-A*33:01; HLA-A*02:02; HLA-A*74:01; HLA-A*02:02; HLA-A*29:01; HLA-A*02:03; HLA-A*02:05; HLA-A*24:07; HLA-A*11:02; HLA-A*36:01; HLA-A*02:22; HLA-A*34:02; HLA-A*01:03; HLA-A*24:02; HLA-A*02:07; HLA-A*23:01; HLA-A*30:01; HLA-A*33:03; HLA-A*02:06; HLA-A*34:02; and HLA-A*68:02.

[0119] Embodiment 47 is the engineered cell of any one of embodiments 3-24 and 26-45, wherein the engineered cell is homozygous for HLA-A and wherein the engineered cell is homozygous for HLA-C wherein the HLA-A allele is selected from any one of the following HLA-A alleles: HLA-A*02:01; HLA-A*01:01; HLA-A*03:01; HLA-A*11:01; HLA-A*26:01; HLA-A*68:01; HLA-A*29:02; HLA-A*31:01; HLA-A*32:01; HLA-A*30:02; HLA-A*25:01; HLA-A*33:01; HLA-A*02:02; HLA-A*74:01; HLA-A*02:02; HLA-A*29:01; HLA-A*02:03; HLA-A*02:05; HLA-A*24:07; HLA-A*11:02; HLA-A*36:01; HLA-A*02:22; HLA-A*34:02; HLA-A*01:03; HLA-A*24:02; HLA-A*02:07; HLA-A*23:01; HLA-A*30:01; HLA-A*33:03; HLA-A*02:06; HLA-A*34:02; and HLA-A*68:02; and the HLA-C allele is selected from any one of the following HLA-C alleles: HLA-C*07:02; HLA-C*07:01; HLA-C*05:01; HLA-C*04:01 HLA-C*03:04; HLA-C*06:02; HLA-C*08:02; HLA-C*08:01; HLA-C*03:02; HLA-C*16:01; HLA-C*15:02; HLA-C*03:04; HLA-C*12:03; HLA-C*02:10; HLA-C*05:01; HLA-C*12:02; HLA-C*14:02; HLA-C*04:01; HLA-C*03:03; HLA-C*07:04; HLA-C*17:01; HLA-C*01:02; and HLA-C*02:02.

[0120] Embodiment 48 is the engineered cell of any one of embodiments 1-47, wherein the cell has reduced or eliminated surface expression of MHC class II protein.

[0121] Embodiment 49 is the engineered cell of any one of embodiments 1-48, wherein the cell has a genetic modification of a gene selected from CIITA, HLA-DR, HLA-DQ, HLA-DP, RFX5, RFXB/ANK, RFXAP, CREB, NF-YA, NF-YB, and NF-YC.

[0122] Embodiment 50 is the engineered cell of any one of embodiments 1-49, wherein the cell has a genetic modification in the CIITA gene.

[0123] Embodiment 51 is the engineered cell of any one of embodiments 1-50, wherein the cell has reduced or eliminated surface expression of TRAC protein.

[0124] Embodiment 52 is the engineered cell of any one of embodiments 1-51, wherein the cell has reduced or eliminated surface expression of TRBC protein.

[0125] Embodiment 53 is the engineered cell of any one of embodiments 1-52, wherein the genetic modification comprises at least 2, at least 3, at least 4, at least 5, at least 6, at least 7, at least 8, at least 9, or at least 10 contiguous nucleotides within the genomic coordinates, or wherein the genetic modification comprises at least 5 contiguous nucleotides within the genomic coordinates.

[0126] Embodiment 54 is the engineered cell of any one of embodiments 1-53, wherein the genetic modification comprises at least 6, 7, 8, 9, or 10 contiguous nucleotides within the genomic coordinates.

[0127] Embodiment 55 is the engineered cell of any one of embodiments 1-54, wherein the genetic modification comprises an indel.

[0128] Embodiment 56 is the engineered cell of any one of embodiments 1-55, wherein the genetic modification comprises at least one C to T substitution or at least one A to G substitution within the genomic coordinates.

[0129] Embodiment 57 is a pharmaceutical composition comprising the engineered cell of any one of embodiments 1-56.

[0130] Embodiment 58 is a population of cells comprising the engineered cell of any one of embodiments 1-57.

[0131] Embodiment 59 is a pharmaceutical composition comprising the population of cells of embodiment 58.

[0132] Embodiment 60 is the population of embodiment 58 or the pharmaceutical composition of embodiment 59, wherein the population of cells is at least 65%, at least 70%, at least 80%, at least 90%, at least 91%, at least 92%, at least 93%, at least 94%, at least 95%, at least 96%, at least 97%, at least 98%, or at least 99% HLA-A negative or HLA-B negative as measured by flow cytometry.

[0133] Embodiment 61 is the population or pharmaceutical composition of any one of embodiments 58-60, wherein at least 65%, at least 70%, at least 80%, at least 85%, at least 90%, at least 95%, at least 96%, at least 97%, at least 98%, or at least 99% of the population of cells comprises the genetic modification in the HLA-A gene or the genetic modification in the HLA-B gene, as measured by next-generation sequencing (NGS).

[0134] Embodiment 62 is the population or pharmaceutical composition of any one of embodiments 58-61, wherein the population of cells is at least 94%, at least 95%, at least 96%, at least 97%, at least 98%, or at least 99% CIITA negative as measured by flow cytometry.

[0135] Embodiment 63 is the population or pharmaceutical composition of any one of embodiments 58-62, wherein the population of cells is at least 95%, at least 97%, at least 98%, at least 99%, or at least 99.5% endogenous TCR protein negative as measured by flow cytometry.

[0136] Embodiment 64 is a method of administering the engineered cell, population of cells, pharmaceutical composition of any one of embodiments 1-63 to a subject in need thereof.

[0137] Embodiment 65 is a method of administering the engineered cell, population of cells, or pharmaceutical composition of any one of embodiments 1-63 to a subject as an adoptive cell transfer (ACT) therapy.

[0138] Embodiment 66 is a method of treating a disease or disorder comprising administering the engineered cell, population of cells, or pharmaceutical composition of any one of embodiments 1-63 to a subject in need thereof.

[0139] Embodiment 67 is a composition, comprising an HLA-B guide RNA, wherein the HLA-B guide RNA comprises: i. a guide sequence selected from SEQ ID NOs: 165, 166, 177, 13, 74, 1-12, 14-73, 75-91, 101-164, 167-176, 178-185; ii. at least 17, 18, 19, or 20 contiguous nucleotides of a sequence selected from SEQ ID NOs: 1-91; or at least 17, 18, 19, 20, 21, 22, 23, or 24 contiguous nucleotides of a sequence selected form SEQ ID NOs: 101-185; iii. a guide sequence at least 95%, 90%, or 85% identical to a sequence selected from SEQ ID NOs: 1-91; or a guide sequence at least 95%, 90%, 85%, 80%, 75%, or 70% identical to a sequence selected from SEQ ID NOs: 101-185; iv. a guide sequence that binds a target site comprising a genomic region listed in Table 2 or 3; or v. a guide sequence that is complementary to at least 17, 18, 19, or 20 contiguous nucleotides of a genomic region listed in Table 2 or a guide sequence that is complementary to at least 17, 18, 19, 20, 21, 22, 23, or 24 contiguous nucleotides of a genomic region listed in Table 3.

[0140] Embodiment 68 is a composition, comprising an HLA-B guide RNA and an HLA-A guide RNA, wherein the HLA-B guide RNA comprises: i. a guide sequence selected from SEQ ID NOs: 165, 166, 177, 13, 74, 1-12, 14-73, 75-91 and 101-164, 167-176, 178-185; ii. at least 17, 18, 19, or 20 contiguous nucleotides of a sequence selected from SEQ ID NOs: 1-91; or at least 17, 18, 19, 20, 21, 22, 23, or 24 contiguous nucleotides of a sequence selected form SEQ ID NOs: 101-185; iii. a guide sequence at least 95%, 90%, or 85% identical to a sequence selected from SEQ ID NOs: 1-91; or a guide sequence at least 95%, 90%, 85%, 80%, 75%, or 70% identical to a sequence selected from SEQ ID NOs: 101-185; iv. a guide sequence that binds a target site comprising a genomic region listed in Table 2 or 3; or v. a guide sequence that is complementary to at least 17, 18, 19, or 20 contiguous nucleotides of a genomic region listed in Table 2 or a guide sequence that is complementary to at least 17, 18, 19, 20, 21, 22, 23, or 24 contiguous nucleotides of a genomic region listed in Table 3, and wherein the HLA-A guide RNA comprises: i. a guide sequence selected from SEQ ID Nos: 576, 571, 301-570, 572-575, 577-590; or ii. at least 17, 18, 19, or 20 contiguous nucleotides of a sequence selected from SEQ ID NOs: 301-428 and 463-511; or at least 17, 18, 19, 20, 21, 22, 23, or 24 contiguous nucleotides of a sequence selected form SEQ ID NOs: 429-462 and 512-590; or iii. a guide sequence at least 95%, 90%, or 85% identical to a sequence selected from SEQ ID NOs: 301-428 and 463-511; or a guide sequence at least 95%, 90%, 85%, 80%, 75%, or 70% identical to a sequence selected from SEQ ID NOs: 512-590; or iv. a guide sequence that binds a target site comprising a genomic region listed in Tables 4-7; or v. a guide sequence that is complementary to at least 17, 18, 19, 20, 21, 22, 23, or 24 contiguous nucleotides of a genomic region listed in Tables 4-7.

[0141] Embodiment 69 is a method of making an engineered human cell, which has reduced or eliminated surface expression of HLA-B protein relative to an unmodified cell, wherein the cell is homozygous for HLA-A and homozygous for HLA-C, comprising: contacting a cell with a composition comprising (i) an HLA-B guide RNA and (ii) optionally an RNA-guided DNA binding agent or a nucleic acid encoding an RNA-guided DNA binding agent, wherein the HLA-B guide RNA comprises: i. a guide sequence selected from SEQ ID NOs: 165, 166, 177, 13, 74, 1-12, 14-73, 75-91, 101-164, 167-176, 178-185; ii. at least 17, 18, 19, or 20 contiguous nucleotides of a sequence selected from SEQ ID NOs: 1-91; or at least 17, 18, 19, 20, 21, 22, 23, or 24 contiguous nucleotides of a sequence selected form SEQ ID NOs: 101-185; iii. a guide sequence at least 95%, 90%, or 85% identical to a sequence selected from SEQ ID NOs: 1-91; or a guide sequence at least 95%, 90%, 85%, 80%, 75%, or 70% identical to a sequence selected from SEQ ID NOs: 101-185; iv. a guide sequence that binds a target site comprising a genomic region listed in Table 2 or 3; or v. a guide sequence that is complementary to at least 17, 18, 19, or 20 contiguous nucleotides of a genomic region listed in Table 2 or a guide sequence that is complementary to at least 17, 18, 19, 20, 21, 22, 23, or 24 contiguous nucleotides of a genomic region listed in Table 3.

[0142] Embodiment 70 is a method of reducing surface expression of HLA-B protein in a human cell relative to an unmodified cell, comprising contacting a cell with a composition comprising (i) an HLA-B guide RNA and (ii) optionally an RNA-guided DNA binding agent or a nucleic acid encoding an RNA-guided DNA binding agent, wherein the HLA-B guide RNA comprises: i. a guide sequence selected from SEQ ID NOs: 165, 166, 177, 13, 74, 1-12, 14-73, 75-91 and 101-164, 167-176, 178-185; ii. at least 17, 18, 19, or 20 contiguous nucleotides of a sequence selected from SEQ ID NOs: 1-91; or at least 17, 18, 19, 20, 21, 22, 23, or 24 contiguous nucleotides of a sequence selected form SEQ ID NOs; and 101-185; iii. a guide sequence at least 95%, 90%, or 85% identical to a sequence selected from SEQ ID NOs: 1-91; or a guide sequence at least 95%, 90%, 85%, 80%, 75%, or 70% identical to a sequence selected from SEQ ID NOs: 101-185; iv. a guide sequence that binds a target site comprising a genomic region listed in Table 2 or 3; or v. a guide sequence that is complementary to at least 17, 18, 19, or 20 contiguous nucleotides of a genomic region listed in Table 2 or a guide sequence that is complementary to at least 17, 18, 19, 20, 21, 22, 23, or 24 contiguous nucleotides of a genomic region listed in Table 3.

[0143] Embodiment 71 is a method of making an engineered human cell, which has reduced or eliminated surface expression of HLA-A and HLA-B protein relative to an unmodified cell, wherein the cell is homozygous for HLA-C, comprising: (a) contacting a cell with a first composition comprising an HLA-B guide RNA and optionally an RNA-guided DNA binding agent or a nucleic acid encoding an RNA-guided DNA binding agent, wherein the HLA-B guide RNA comprises: i. a guide sequence selected from SEQ ID NOs: 165, 166, 177, 13, 74, 1-12, 14-73, 75-91 and 101-164, 167-176, 178-185; or ii. at least 17, 18, 19, or 20 contiguous nucleotides of a sequence selected from SEQ ID NOs: 1-91; or at least 17, 18, 19, 20, 21, 22, 23, or 24 contiguous nucleotides of a sequence selected form SEQ ID NOs: 101-185; or iii. a guide sequence at least 95%, 90%, or 85% identical to a sequence selected from SEQ ID NOs: 1-91; or a guide sequence at least 95%, 90%, 85%, 80%, 75%, or 70% identical to a sequence selected from SEQ ID NOs: 101-185; iv. a guide sequence that binds a target site comprising a genomic region listed in Table 2 or 3; or v. a guide sequence that is complementary to at least 17, 18, 19, or 20 contiguous nucleotides of a genomic region listed in Table 2 or a guide sequence that is complementary to at least 17, 18, 19, 20, 21, 22, 23, or 24 contiguous nucleotides of a genomic region listed in Table 3; and (b) contacting a cell with a second composition comprising an HLA-A guide RNA and optionally an RNA-guided DNA binding agent or a nucleic acid encoding an RNA-guided DNA binding agent, wherein the HLA-A guide RNA comprises: i. a guide sequence selected from SEQ ID Nos: 576, 571, 301-570, 572-575, 577-590; or ii. at least 17, 18, 19, or 20 contiguous nucleotides of a sequence selected from SEQ ID NOs: 301-428 and 463-511; or at least 17, 18, 19, 20, 21, 22, 23, or 24 contiguous nucleotides of a sequence selected form SEQ ID NOs: 429-462 and 512-590; or iii. a guide sequence at least 95%, 90%, or 85% identical to a sequence selected from SEQ ID NOs: 301-428 and 463-511; or a guide sequence at least 95%, 90%, 85%, 80%, 75%, or 70% identical to a sequence selected from SEQ ID NOs: 512-590; or iv. a guide sequence that binds a target site comprising a genomic region listed in Tables 4-7; or a guide sequence that is complementary to at least 17, 18, 19, 20, 21, 22, 23, or 24 contiguous nucleotides of a genomic region listed in Tables 4-7.

[0144] Embodiment 72 is a method of reducing surface expression of HLA-A protein and HLA-B protein in a human cell relative to an unmodified cell, comprising (a) contacting a cell with a first composition comprising an HLA-B guide RNA and optionally an RNA-guided DNA binding agent or a nucleic acid encoding an RNA-guided DNA binding agent, wherein the HLA-B guide RNA comprises: i. a guide sequence selected from SEQ ID NOs: 165, 166, 177, 13, 74, 1-12, 14-73, 75-91 and 101-164, 167-176, 178-185; ii. at least 17, 18, 19, or 20 contiguous nucleotides of a sequence selected from SEQ ID NOs: 1-91; or at least 17, 18, 19, 20, 21, 22, 23, or 24 contiguous nucleotides of a sequence selected form SEQ ID NOs; and 101-185; iii. a guide sequence at least 95%, 90%, or 85% identical to a sequence selected from SEQ ID NOs: 1-91; or a guide sequence at least 95%, 90%, 85%, 80%, 75%, or 70% identical to a sequence selected from SEQ ID NOs: 101-185; iv. a guide sequence that binds a target site comprising a genomic region listed in Table 2 or 3; or v. a guide sequence that is complementary to at least 17, 18, 19, or 20 contiguous nucleotides of a genomic region listed in Table 2 or a guide sequence that is complementary to at least 17, 18, 19, 20, 21, 22, 23, or 24 contiguous nucleotides of a genomic region listed in Table 3; and (b) contacting a cell with a second composition comprising an HLA-A guide RNA and optionally an RNA-guided DNA binding agent or a nucleic acid encoding an RNA-guided DNA binding agent, wherein the HLA-A guide RNA comprises: i. a guide sequence selected from SEQ ID Nos: 576, 571, 301-570, 572-575, 577-590; or ii. at least 17, 18, 19, or 20 contiguous nucleotides of a sequence selected from SEQ ID NOs: 301-428 and 463-511; or at least 17, 18, 19, 20, 21, 22, 23, or 24 contiguous nucleotides of a sequence selected form SEQ ID NOs: 429-462 and 512-590; or iii. a guide sequence at least 95%, 90%, or 85% identical to a sequence selected from SEQ ID NOs: 301-428 and 463-511; or a guide sequence at least 95%, 90%, 85%, 80%, 75%, or 70% identical to a sequence selected from SEQ ID NOs: 429-462 and 512-590; or iv. a guide sequence that binds a target site comprising a genomic region listed in Tables 4-7; or v. a guide sequence that is complementary to at least 17, 18, 19, 20, 21, 22, 23, or 24 contiguous nucleotides of a genomic region listed in Tables 4-7.

[0145] Embodiment 73 is the engineered cell, population of cells, pharmaceutical composition, or method of any one of embodiments 1-72, wherein the RNA-guided DNA-binding agent or nucleic acid encoding the RNA-guided DNA binding agent is SpyCas9, and the HLA-B guide RNA comprises: (i) a guide sequence selected from SEQ ID NOs: 13, 74, 1-12, 14-73, 75-91; or (ii) a guide sequence that is at least 17, 18, 19, 20, 21, 22, 23, or 24 contiguous nucleotides of a sequence selected from SEQ ID NOs: 1-91; or (iii) a guide sequence that is at least 17, 18, 19, or 20 contiguous nucleotides of a sequence selected from SEQ ID NOs: 1-91; or (iv) a guide sequence that binds a target site comprising a genomic region listed in Table 2; or (v) a guide sequence that is complementary to at least 17, 18, 19, or 20 contiguous nucleotides of a genomic region listed in Table 2; or (vi) a guide sequence at least 95%, 90%, or 85% identical to a sequence selected from SEQ ID NOs: 1-91.

[0146] Embodiment 74 is the engineered cell, population of cells, pharmaceutical composition, or method of any one of embodiments 1-72, wherein the RNA-guided DNA-binding agent or nucleic acid encoding the RNA-guided DNA binding agent is NmeCas9, and the HLA-B guide RNA comprises: (i) a guide sequence selected from SEQ ID NOs: 165, 166, 177, 101-164, 167-176, and 178-185; or (ii) a guide sequence that is at least 17, 18, 19, 20, 21, 22, 23, or 24 contiguous nucleotides of a sequence selected from SEQ ID NOs: 101-185; or (iii) a guide sequence that is at least 17, 18, 19, 20, 21, 22, 23, or 24 contiguous nucleotides of a sequence selected from SEQ ID NOs: 101-185; or (iv) a guide sequence that binds a target site comprising a genomic region listed in Table 3; or (v) a guide sequence that is complementary to at least 17, 18, 19, 20, 21, 22, 23, or 24 contiguous nucleotides of a genomic region listed in Table 3; or (vi) a guide sequence at least 95%, 90%, 85%, 80%, 75%, or 70% identical to a sequence selected from SEQ ID NOs: 101-185.

[0147] Embodiment 75 is the engineered cell, population of cells, pharmaceutical composition, or method of any one of embodiments 1-72, wherein the RNA-guided DNA-binding agent or nucleic acid encoding the RNA-guided DNA binding agent is NmeCas9, and the HLA-B guide RNA comprises: (i) a guide sequence selected from SEQ ID NOs: 165, 166, 163, 164, 169, and 177; or (ii) a guide sequence that is at least 17, 18, 19, 20, 21, 22, 23, or 24 contiguous nucleotides of a sequence selected from SEQ ID NOs: 165, 166, 163, 164, and 177; or (iii) a guide sequence at least 95%, 90%, 85%, 80%, 75%, or 70% identical to a sequence selected from SEQ ID NOs: 165, 166, 163, 164, and 177.

[0148] Embodiment 76 is the composition or method of any one of embodiments 67-75, wherein the HLA-B guide RNA or the HLA-A guide RNA comprises at least one modification.

[0149] Embodiment 77 is the composition or method of any one of embodiments 67-76, wherein the HLA-B guide RNA or the HLA-A guide RNA comprises at least one modification, wherein the at least one modification includes a 2′-O-methyl (2′-O-Me) modified nucleotide.

[0150] Embodiment 78 is the composition or method of any one of embodiments 67-77, wherein the HLA-B guide RNA or the HLA-A guide RNA comprises at least one modification, comprising a phosphorothioate (PS) bond between nucleotides.

[0151] Embodiment 79 is the composition or method of any one of embodiments 67-78, wherein the HLA-B guide RNA or the HLA-A guide RNA comprises at least one modification, comprising a 2′-fluoro (2′-F) modified nucleotide.

[0152] Embodiment 80 is the composition or method of any one of embodiments 67-79, wherein the HLA-B guide RNA or the HLA-A guide RNA comprises at least one modification, comprising a modification at one or more of the first five nucleotides at the 5′ end of the guide RNA.

[0153] Embodiment 81 is the composition or method of any one of embodiments 67-80, wherein the HLA-B guide RNA or the HLA-A guide RNA comprises at least one modification, comprising a modification at one or more of the last five nucleotides at the 3′ end of the guide RNA.

[0154] Embodiment 82 is the composition or method of any one of embodiments 67-81, wherein the HLA-B guide RNA or the HLA-A guide RNA comprises at least one modification, comprising a PS bond between the first four nucleotides of the guide RNA.

[0155] Embodiment 83 is the composition or method of any one of embodiments 67-82, wherein the HLA-B guide RNA or the HLA-A guide RNA comprises at least one modification, comprising a PS bond between the last four nucleotides of the guide RNA.

[0156] Embodiment 84 is the composition or method of any one of embodiments 67-83, wherein the HLA-B guide RNA or the HLA-A guide RNA comprises at least one modification, comprising a 2′-O-Me modified nucleotide at the first three nucleotides at the 5′ end of the guide RNA.

[0157] Embodiment 85 is the composition or method of any one of embodiments 67-84, wherein the HLA-B guide RNA or the HLA-A guide RNA comprises at least one modification, comprising a 2′-O-Me modified nucleotide at the last three nucleotides at the 3′ end of the guide RNA.

[0158] Embodiment 86 is the method of any one of embodiments 67-85, further comprising reducing or eliminating the surface expression of MHC class II protein in the cell relative to an unmodified cell, for example by contacting the cell with a gene editing system targeting a gene selected from CIITA, HLA-DR, HLA-DQ, HLA-DP, RFX5, RFXB/ANK, RFXAP, CREB, NF-YA, NF-YB, and NF-YC.

[0159] Embodiment 87 is the method of any one of embodiments 67-86, further comprising contacting the cell with a CIITA guide RNA.

[0160] Embodiment 88 is the method of any one of embodiments 67-87, further comprising reducing or eliminating the surface expression of a TCR protein in the cell relative to an unmodified cell.

[0161] Embodiment 89 is the method of any one of embodiments 67-88, further comprising contacting the cell with an exogenous nucleic acid.

[0162] Embodiment 90 is the method of embodiment 89, further comprising contacting the cell with an exogenous nucleic acid encoding a targeting receptor.

[0163] Embodiment 91 is the method of embodiment 89, further comprising contacting the cell with an exogenous nucleic acid encoding a polypeptide that is secreted by the cell.

[0164] Embodiment 92 is the method of embodiment 89, further comprising contacting the cell with a DNA-dependent protein kinase inhibitor (DNAPKi).

[0165] Embodiment 93 is the method of embodiment 92, wherein the DNAPKi is Compound 1.

[0166] Embodiment 94 is the engineered cell, population of cells, pharmaceutical composition, or method of any one of embodiments 1-93, wherein the cell is an allogeneic cell.

[0167] Embodiment 95 is the engineered cell, population of cells, pharmaceutical composition, or method of any one of embodiments 1-94, wherein the cell is a primary cell.

[0168] Embodiment 96 is the engineered cell, population of cells, pharmaceutical composition, or method of any one of embodiments 1-94, wherein the cell is a CD4+ T cell.

[0169] Embodiment 97 is the engineered cell, population of cells, pharmaceutical composition, or method of any one of embodiments 1-94, wherein the cell is a CD8+ T cell.

[0170] Embodiment 98 is the engineered cell, population of cells, pharmaceutical composition, or method of any one of embodiments 1-94, wherein the cell is a memory T cell.

[0171] Embodiment 99 is the engineered cell, population of cells, pharmaceutical composition, or method of any one of embodiments 1-94, wherein the cell is a B cell.

[0172] Embodiment 100 is the engineered cell, population of cells, pharmaceutical composition, or method of any one of embodiments 1-94, wherein the cell is a plasma B cell.

[0173] Embodiment 101 is the engineered cell, population of cells, pharmaceutical composition, or method of any one of embodiments 1-94, wherein the cell is a memory B cell.

[0174] Embodiment 102 is the engineered cell, population of cells, pharmaceutical composition, or method of any one of embodiments 1-94, wherein the cell is a natural killer (NK) cell.

[0175] Embodiment 103 is the engineered cell, population of cells, pharmaceutical composition, or method of any one of embodiments 1-94, wherein the cell is a macrophage.

[0176] Embodiment 104 is the engineered cell, population of cells, pharmaceutical composition, or method of any one of embodiments 1-94, wherein the cell is a stem cell.

[0177] Embodiment 105 is the engineered cell, population of cells, pharmaceutical composition, or method of any one of embodiments 1-94, wherein the cell is a pluripotent stem cell (PSC).

[0178] Embodiment 106 is the engineered cell, population of cells, pharmaceutical composition, or method of any one of embodiments 1-94, wherein the cell is a hematopoietic stem cell (HSC).

[0179] Embodiment 107 is the engineered cell, population of cells, pharmaceutical composition, or method of any one of embodiments 1-94, wherein the cell is an induced pluripotent stem cell (iPSC).

[0180] Embodiment 108 is the engineered cell, population of cells, pharmaceutical composition, or method of any one of embodiments 1-94, wherein the cell is a mesenchymal stem cell (MSC).

[0181] Embodiment 109 is the engineered cell, population of cells, pharmaceutical composition, or method of any one of embodiments 1-94, wherein the cell is a neural stem cell (NSC).

[0182] Embodiment 110 is the engineered cell, population of cells, pharmaceutical composition, or method of any one of embodiments 1-94, wherein the cell is a limbal stem cell (LSC).

[0183] Embodiment 111 is the engineered cell, population of cells, pharmaceutical composition, or method of any one of embodiments 1-94, wherein the cell is a progenitor cell, e.g. an endothelial progenitor cell or a neural progenitor cell.

[0184] Embodiment 112 is the engineered cell, population of cells, pharmaceutical composition, or method of any one of embodiments 1-94, wherein the cell is a tissue-specific primary cell.

[0185] Embodiment 113 is the engineered cell, population of cells, pharmaceutical composition, or method of any one of embodiments 1-94, wherein the cell is a chosen from: chondrocyte, myocyte, and keratinocyte.

[0186] Embodiment 114 is the engineered cell, population of cells, pharmaceutical composition, or method of any one of embodiments 1-94, wherein the cell is an activated cell.

[0187] Embodiment 115 is the engineered cell, population of cells, pharmaceutical composition, or method of any one of embodiments 1-94, wherein the cell is a non-activated cell.

[0188] Embodiment 116 is the engineered cell, population of cells, pharmaceutical composition, or method of any one of embodiments 1-115, comprising an exogenous nucleic acid encoding a polypeptide that is secreted by the cell or contacting the cell with said exogenous nucleic acid, wherein the secreted polypeptide is an antibody or antibody fragment.

[0189] Embodiment 117 is the engineered cell, population of cells, pharmaceutical composition, or method of any one of embodiments 1-116, comprising an exogenous nucleic acid encoding a polypeptide that is secreted by the cell or contacting the cell with said exogenous nucleic acid, wherein the secreted polypeptide is a full-length IgG antibody.

[0190] Embodiment 118 is the engineered cell, population of cells, pharmaceutical composition, or method of any one of embodiments 1-116, comprising an exogenous nucleic acid encoding a polypeptide that is secreted by the cell or contacting the cell with said exogenous nucleic acid, wherein the secreted polypeptide is a single chain antibody.

[0191] Embodiment 119 is the engineered cell, population of cells, pharmaceutical composition, or method of any one of embodiments 1-118, comprising an exogenous nucleic acid encoding a polypeptide that is secreted by the cell or contacting the cell with said exogenous nucleic acid, wherein the secreted polypeptide is a neutralizing antibody.

[0192] Embodiment 120 is the engineered cell, population of cells, pharmaceutical composition, or method of any one of embodiments 1-115, comprising an exogenous nucleic acid encoding a polypeptide that is secreted by the cell or contacting the cell with said exogenous nucleic acid, wherein the secreted polypeptide is an enzyme.

[0193] Embodiment 121 is the engineered cell, population of cells, pharmaceutical composition, or method of any one of embodiments 1-115, comprising an exogenous nucleic acid encoding a polypeptide that is secreted by the cell or contacting the cell with said exogenous nucleic acid, wherein the secreted polypeptide is a cytokine.

[0194] Embodiment 122 is the engineered cell, population of cells, pharmaceutical composition, or method of any one of embodiments 1-121, comprising an exogenous nucleic acid encoding a polypeptide that is secreted by the cell or contacting the cell with said exogenous nucleic acid, wherein the secreted polypeptide is a fusion protein.

[0195] Embodiment 123 is the engineered cell, population of cells, pharmaceutical composition, or method of any one of embodiments 1-122, comprising an exogenous nucleic acid encoding a polypeptide that is secreted by the cell or contacting the cell with said exogenous nucleic acid, wherein the secreted polypeptide comprises a soluble receptor.

[0196] Embodiment 124 is the engineered cell, population of cells, pharmaceutical composition, or method of any one of embodiments 1-115, comprising an exogenous nucleic acid encoding a targeting receptor or contacting the cell with an exogenous nucleic acid encoding a targeting receptor, wherein the targeting receptor is a T cell receptor (TCR).

[0197] Embodiment 125 is the engineered cell, population of cells, pharmaceutical composition, or method of any one of embodiments 1-115, comprising an exogenous nucleic acid encoding a targeting receptor or contacting the cell with an exogenous nucleic acid encoding a targeting receptor, wherein the targeting receptor is a genetically modified TCR.

[0198] Embodiment 126 is the engineered cell, population of cells, pharmaceutical composition, or method of any one of embodiments 1-115, comprising an exogenous nucleic acid encoding a targeting receptor or contacting the cell with an exogenous nucleic acid encoding a targeting receptor, wherein the targeting receptor is a WT1 TCR.

[0199] Embodiment 127 is the engineered cell, population of cells, pharmaceutical composition, or method of any one of embodiments 1-115, comprising an exogenous nucleic acid encoding a targeting receptor or contacting the cell with an exogenous nucleic acid encoding a targeting receptor, wherein the targeting receptor is a CAR.

[0200] Embodiment 128 is the engineered cell, population of cells, pharmaceutical composition, or method of any one of embodiments 1-115, comprising an exogenous nucleic acid encoding a targeting receptor or contacting the cell with an exogenous nucleic acid encoding a targeting receptor, wherein the targeting receptor is a universal CAR.

[0201] Embodiment 129 is the engineered cell, population of cells, pharmaceutical composition, or method of any one of embodiments 1-127, comprising an exogenous nucleic acid encoding a targeting receptor or contacting the cell with an exogenous nucleic acid encoding a targeting receptor, wherein the targeting receptor is an anti-CD30 CAR.

[0202] Embodiment 130 is the engineered cell, population of cells, pharmaceutical composition, or method of any one of embodiments 1-129, comprising an exogenous nucleic acid encoding a targeting receptor or contacting the cell with an exogenous nucleic acid encoding a targeting receptor, wherein the targeting receptor is a proliferation-inducing ligand (APRIL).

[0203] Embodiment 131 is the engineered cell, population of cells, pharmaceutical composition, or method of any one of embodiments 1-129, wherein the cells are engineered with a gene editing system.

[0204] Embodiment 132 is the engineered cell, population of cells, pharmaceutical composition, or method of embodiment 131, wherein the gene editing system comprises a transcription activator-like effector nuclease (TALEN).

[0205] Embodiment 133 is the engineered cell, population of cells, pharmaceutical composition, or method of embodiment 131, wherein the gene editing system comprises a zinc finger nuclease.

[0206] Embodiment 134 is the engineered cell, population of cells, pharmaceutical composition, or method of embodiment 131, wherein the gene editing system comprises an RNA-guided DNA binding agent or a nucleic acid encoding an RNA-guided DNA binding agent.

[0207] Embodiment 135 is the engineered cell, population of cells, pharmaceutical composition, or method of any one of embodiments 67-134, wherein the RNA-guided DNA-binding agent or the RNA-guided DNA-binding agent encoded by the nucleic acid comprises a Cas9 protein.

[0208] Embodiment 136 is the engineered cell, population of cells, pharmaceutical composition, or method of any one of embodiments 67-135, wherein the RNA-guided DNA-binding agent or the RNA-guided DNA-binding agent encoded by the nucleic acid is S. pyogenes Cas9.

[0209] Embodiment 137 is the engineered cell, population of cells, pharmaceutical composition, or method of any one of embodiments 67-135, wherein the RNA-guided DNA-binding agent or the RNA-guided DNA-binding agent encoded by the nucleic acid is N. meningitidis Cas9, optionally Nme2Cas9.

[0210] Embodiment 138 is the engineered cell, population of cells, pharmaceutical composition, or method of any one of embodiments 67-135, wherein the RNA-guided DNA-binding agent or the RNA-guided DNA-binding agent encoded by the nucleic acid is S. thermophilus Cas9.

[0211] Embodiment 139 is the engineered cell, population of cells, pharmaceutical composition, or method of any one of embodiments 67-135, wherein the RNA-guided DNA-binding agent or the RNA-guided DNA-binding agent encoded by the nucleic acid is S. aureus Cas9.

[0212] Embodiment 140 is the engineered cell, population of cells, pharmaceutical composition, or method of any one of embodiments 67-135, wherein the RNA-guided DNA-binding agent or the RNA-guided DNA-binding agent encoded by the nucleic acid is Cpf1 from F. novicida.

[0213] Embodiment 141 is the engineered cell, population of cells, pharmaceutical composition, or method of any one of embodiments 67-135, wherein the RNA-guided DNA-binding agent or the RNA-guided DNA-binding agent encoded by the nucleic acid is Cpf1 from Acidaminococcus sp.

[0214] Embodiment 142 is the engineered cell, population of cells, pharmaceutical composition, or method of any one of embodiments 67-135, wherein the RNA-guided DNA-binding agent or the RNA-guided DNA-binding agent encoded by the nucleic acid is Cpf1 from Lachnospiraceae bacterium ND2006.

[0215] Embodiment 143 is the engineered cell, population of cells, pharmaceutical composition, or method of any one of embodiments 67-135, wherein the RNA-guided DNA-binding agent or the RNA-guided DNA-binding agent encoded by the nucleic acid is Cas12a.

[0216] Embodiment 144 is the engineered cell, population of cells, pharmaceutical composition, or method of any one of embodiments 67-135, wherein the RNA-guided DNA-binding agent or the RNA-guided DNA-binding agent encoded by the nucleic acid is CasX.

[0217] Embodiment 145 is the engineered cell, population of cells, pharmaceutical composition, or method of any one of embodiments 67-135, wherein the RNA-guided DNA-binding agent or the RNA-guided DNA-binding agent encoded by the nucleic acid is Mad7 nuclease.

[0218] Embodiment 146 is the engineered cell, population of cells, pharmaceutical composition, or method of any one of embodiments 67-135, wherein the RNA-guided DNA-binding agent or the RNA-guided DNA-binding agent encoded by the nucleic acid is an ARCUS nucleases.

[0219] Embodiment 147 is the engineered cell, population of cells, pharmaceutical composition, or method of any one of embodiments 67-135, wherein the RNA-guided DNA-binding agent or the RNA-guided DNA-binding agent encoded by the nucleic acid is an A to G base editor.

[0220] Embodiment 148 is the engineered cell, population of cells, pharmaceutical composition, or method of any one of embodiments 67-135, wherein the RNA-guided DNA-binding agent or the RNA-guided DNA-binding agent encoded by the nucleic acid is a C to T base editor.

[0221] Embodiment 149 is the engineered cell, population of cells, pharmaceutical composition, or method of any one of embodiments 67-135, wherein the RNA-guided DNA-binding agent or the RNA-guided DNA-binding agent encoded by the nucleic acid comprises a cytidine deaminase and an RNA-guided nickase.

[0222] Embodiment 150 is the engineered cell, population of cells, pharmaceutical composition, or method of any one of embodiments 1-149, wherein the cell is engineered by a base editing system comprising a C to T base editor or an A to G base editor.

[0223] Embodiment 151 is the engineered cell, population of cells, pharmaceutical composition, or method of any one of the immediately preceding embodiment, wherein the base editing system comprises a polypeptide comprising a cytidine deaminase and an RNA-guided nickase, or a nucleic acid encoding the polypeptide.

[0224] Embodiment 152 is the engineered cell, population of cells, pharmaceutical composition, or method of embodiment 149 or 151 wherein the cytidine deaminase comprises APOBEC3A deaminase (A3A).

[0225] Embodiment 153 is the engineered cell, population of cells, pharmaceutical composition, or method of embodiment 151, wherein the polypeptide comprises an amino acid sequence that is at least 80%, 85%, 90%, 95%, 98%, or 100% identical to SEQ ID NO: 811 or 976.

[0226] Embodiment 154 is the engineered cell, population of cells, pharmaceutical composition, or method of embodiment 151, wherein the nucleic acid encoding the polypeptide comprises a sequence that is at least 80%, 85%, 90%, 95%, 98%, or 100% identical to SEQ ID NO: 804 or SEQ ID NO: 822.

[0227] Embodiment 155 is the engineered cell, population of cells, pharmaceutical composition, or method of any one of embodiment 148-154, wherein the base editing system further comprises a uracil glycosylase inhibitor (UGI) in a polypeptide different from the polypeptide comprising a cytidine deaminase and an RNA-guided nickase.

[0228] Embodiment 156 is the engineered cell, population of cells, pharmaceutical composition, or method of embodiment 148-152, wherein the polypeptide comprising the cytidine deaminase and the RNA-guided nickase further comprises a uracil glycosylase inhibitor (UGI).

[0229] Embodiment 157 is the engineered cell, population of cells, pharmaceutical composition, or method of embodiment 156, wherein the polypeptide comprises an amino acid sequence that is at least 80%, 85%, 90%, 95%, 98%, or 100% identical to any one of SEQ ID NO: 977, 978, 979, and 980.

[0230] Embodiment 158 is the engineered cell, population of cells, pharmaceutical composition, or method of any one of embodiments 67-157, wherein the HLA-A guide RNA or the HLA-B guide RNA is provided to the cell in a vector.

[0231] Embodiment 159 is the engineered cell, population of cells, pharmaceutical composition, or method of any one of embodiments 67-158, wherein the RNA-guided DNA binding agent is provided to the cell in a vector, optionally in the same vector as the HLA-A guide RNA or the HLA-B guide RNA.

[0232] Embodiment 160 is the engineered cell, population of cells, pharmaceutical composition, or method of any one of embodiments 87-159, wherein the exogenous nucleic acid is provided to the cell in a vector.

[0233] Embodiment 161 is the engineered cell, population of cells, pharmaceutical composition, or method of any one of embodiments 158-160, wherein the vector is a viral vector.

[0234] Embodiment 162 is the engineered cell, population of cells, pharmaceutical composition, or method of any one of embodiments 158-160, wherein the vector is a non-viral vector.

[0235] Embodiment 163 is the engineered cell, population of cells, pharmaceutical composition, or method of any one of embodiments 158-160, wherein the vector is a lentiviral vector.

[0236] Embodiment 164 is the engineered cell, population of cells, pharmaceutical composition, or method of any one of embodiments 158-160, wherein the vector is a retroviral vector.

[0237] Embodiment 165 is the engineered cell, population of cells, pharmaceutical composition, or method of any one of embodiments 158-160, wherein the vector is an AAV.

[0238] Embodiment 166 is the engineered cell, population of cells, pharmaceutical composition, or method of any one of embodiments 67-165, wherein the guide RNA is provided to the cell in a lipid nanoparticle (LNP).

[0239] Embodiment 167 is the engineered cell, population of cells, pharmaceutical composition, or method of any one of embodiments 67-166, wherein the guide RNA is provided to the cell in a same lipid nanoparticle (LNP) as an RNA-guided DNA binding agent.

[0240] Embodiment 168 is the engineered cell, population of cells, pharmaceutical composition, or method of any one of embodiments 87-167, wherein the exogenous nucleic acid is provided to the cell in a lipid nanoparticle (LNP).

[0241] Embodiment 169 is the engineered cell, population of cells, pharmaceutical composition, or method of any one of embodiments 87-168, wherein the exogenous nucleic acid is integrated into the genome of the cell.

[0242] Embodiment 170 is the engineered cell, population of cells, pharmaceutical composition, or method of any one of embodiments 87-169, wherein the exogenous nucleic acid is integrated into the genome of the cell by homologous recombination (HR).

[0243] Embodiment 171 is the engineered cell, population of cells, pharmaceutical composition, or method of any one of embodiments 87-170, wherein the exogenous nucleic acid is integrated into a safe harbor locus in the genome of the cell.

[0244] Embodiment 172 is the engineered cell, population of cells, pharmaceutical composition, or method of any one of embodiments 87-171, wherein the exogenous nucleic acid is integrated into the gene of the cell by nonhomologous end joining (NHEJ).

[0245] Embodiment 173 is the engineered cell, population of cells, pharmaceutical composition, composition, or method of any one of embodiments 67-172, wherein the HLA-B guide RNA comprises a guide sequence selected from SEQ ID NOs: 3, 13, 18, 32, 36, 39, 48-56, 58, 64-71, 73-74, 80-82, 86, and 88-91.

[0246] Embodiment 174 is the engineered cell, population of cells, pharmaceutical composition, composition, or method of any one of embodiments 67-172, wherein the HLA-B guide RNA comprises a guide sequence selected from SEQ ID NOs: 3, 13, 36, 39, 49-56, 64-71, 74, 80-82, 88, and 90-91.

[0247] Embodiment 175 is the engineered cell, population of cells, pharmaceutical composition, composition, or method of any one of embodiments 67-172, wherein the HLA-B guide RNA comprises a guide sequence selected from SEQ ID NOs: 13, 39, 49, 52, 65, 74, 82, and 91.

[0248] Embodiment 176 is the engineered cell, population of cells, pharmaceutical composition, composition, or method of any one of embodiments 67-172, wherein the HLA-B guide RNA comprises a guide sequence selected from SEQ ID NOs: 3, 39, and 49-52.

[0249] Embodiment 177 is the engineered cell, population of cells, pharmaceutical composition, composition, or method of any one of embodiments 67-172, wherein the HLA-B guide RNA comprises a guide sequence selected from SEQ ID NOs: 3, 36, 39, 49, 50, 51, and 52.

[0250] Embodiment 178 is the engineered cell, population of cells, pharmaceutical composition, composition, or method of any one of embodiments 67-172, wherein the HLA-B guide RNA comprises a guide sequence selected from SEQ ID NOs: 39, 49, and 52.

[0251] Embodiment 179 is the engineered cell, population of cells, pharmaceutical composition, composition, or method of any one of embodiments 67-172, wherein the HLA-B guide RNA comprises a guide sequence selected from SEQ ID NOs: 49, 52-54, 55, 56, 64, 65, 67-71, 73-74, 80-82, and 90.

[0252] Embodiment 180 is the engineered cell, population of cells, pharmaceutical composition, composition, or method of any one of embodiments 67-172, wherein the HLA-B guide RNA comprises a guide sequence selected from SEQ ID NOs: 49, 51, 74, 81, and 82.

[0253] Embodiment 181 is the engineered cell, population of cells, pharmaceutical composition, composition, or method of any one of embodiments 67-172, wherein the HLA-B guide RNA comprises a guide sequence selected from SEQ ID NOs: 101, 103, 106, 107, 114, 117, 118, 125-129, 137, 138, 141, 143, 144, 145, 159, 160, 163, 164, 165, 166, 169, 171, 172, 173, 176, 177, 178, 179, and 180.

[0254] Embodiment 182 is the engineered cell, population of cells, pharmaceutical composition, composition, or method of any one of embodiments 67-172, wherein the HLA-B guide RNA comprises a guide sequence selected from SEQ ID NOs: 65 and 74.

[0255] Embodiment 183 is the engineered cell, population of cells, pharmaceutical composition, composition, or method of any one of embodiments 67-172, wherein the HLA-B guide RNA comprises a guide sequence selected from SEQ ID NOs: 49, 52-54, 56, 64-65, 67-71, 73-74, 80-82, 88, and 90-91.

[0256] Embodiment 184 is the engineered cell, population of cells, pharmaceutical composition, composition, or method of any one of embodiments 67-172, wherein the HLA-B guide RNA comprises a guide sequence selected from SEQ ID NOs: 74, 82, and 91.

[0257] Embodiment 185 is the engineered cell, population of cells, pharmaceutical composition, composition, or method of any one of embodiments 67-172, wherein the HLA-B guide RNA comprises a guide sequence selected from SEQ ID NOs: 3, 13, 18, 32, 36, 39, 48-56, 58, 64-71, 73-74, 80-82, 86, and 88-90.

[0258] Embodiment 186 is the engineered cell, population of cells, pharmaceutical composition, composition, or method of any one of embodiments 67-172, wherein the HLA-B guide RNA comprises SEQ ID NO: 3.

[0259] Embodiment 187 is the engineered cell, population of cells, pharmaceutical composition, composition, or method of any one of embodiments 67-172, wherein the HLA-B guide RNA comprises SEQ ID NO: 13.

[0260] Embodiment 188 is the engineered cell, population of cells, pharmaceutical composition, composition, or method of any one of embodiments 67-172, wherein the HLA-B guide RNA comprises SEQ ID NO: 18.

[0261] Embodiment 189 is the engineered cell, population of cells, pharmaceutical composition, composition, or method of any one of embodiments 67-172, wherein the HLA-B guide RNA comprises SEQ ID NO: 32.

[0262] Embodiment 190 is the engineered cell, population of cells, pharmaceutical composition, composition, or method of any one of embodiments 67-172, wherein the HLA-B guide RNA comprises SEQ ID NO: 36.

[0263] Embodiment 191 is the engineered cell, population of cells, pharmaceutical composition, composition, or method of any one of embodiments 67-172, wherein the HLA-B guide RNA comprises SEQ ID NO: 39.

[0264] Embodiment 192 is the engineered cell, population of cells, pharmaceutical composition, composition, or method of any one of embodiments 67-172, wherein the HLA-B guide RNA comprises SEQ ID NO: 48.

[0265] Embodiment 193 is the engineered cell, population of cells, pharmaceutical composition, composition, or method of any one of embodiments 67-172, wherein the HLA-B guide RNA comprises SEQ ID NO: 49.

[0266] Embodiment 194 is the engineered cell, population of cells, pharmaceutical composition, composition, or method of any one of embodiments 67-172, wherein the HLA-B guide RNA comprises SEQ ID NO: 50.

[0267] Embodiment 195 is the engineered cell, population of cells, pharmaceutical composition, composition, or method of any one of embodiments 67-172, wherein the HLA-B guide RNA comprises SEQ ID NO: 51.

[0268] Embodiment 196 is the engineered cell, population of cells, pharmaceutical composition, composition, or method of any one of embodiments 67-172, wherein the HLA-B guide RNA comprises SEQ ID NO: 52.

[0269] Embodiment 197 is the engineered cell, population of cells, pharmaceutical composition, composition, or method of any one of embodiments 67-172, wherein the HLA-B guide RNA comprises SEQ ID NO: 53.

[0270] Embodiment 198 is the engineered cell, population of cells, pharmaceutical composition, composition, or method of any one of embodiments 67-172, wherein the HLA-B guide RNA comprises SEQ ID NO: 54.

[0271] Embodiment 199 is the engineered cell, population of cells, pharmaceutical composition, composition, or method of any one of embodiments 67-172, wherein the HLA-B guide RNA comprises SEQ ID NO: 55.

[0272] Embodiment 200 is the engineered cell, population of cells, pharmaceutical composition, composition, or method of any one of embodiments 67-172, wherein the HLA-B guide RNA comprises SEQ ID NO: 56.

[0273] Embodiment 201 is the engineered cell, population of cells, pharmaceutical composition, composition, or method of any one of embodiments 67-172, wherein the HLA-B guide RNA comprises SEQ ID NO: 58.

[0274] Embodiment 202 is the engineered cell, population of cells, pharmaceutical composition, composition, or method of any one of embodiments 67-172, wherein the HLA-B guide RNA comprises SEQ ID NO: 64.

[0275] Embodiment 203 is the engineered cell, population of cells, pharmaceutical composition, composition, or method of any one of embodiments 67-172, wherein the HLA-B guide RNA comprises SEQ ID NO: 65.

[0276] Embodiment 204 is the engineered cell, population of cells, pharmaceutical composition, composition, or method of any one of embodiments 67-172, wherein the HLA-B guide RNA comprises SEQ ID NO: 66.

[0277] Embodiment 205 is the engineered cell, population of cells, pharmaceutical composition, composition, or method of any one of embodiments 67-172, wherein the HLA-B guide RNA comprises SEQ ID NO: 67.

[0278] Embodiment 206 is the engineered cell, population of cells, pharmaceutical composition, composition, or method of any one of embodiments 67-172, wherein the HLA-B guide RNA comprises SEQ ID NO: 68.

[0279] Embodiment 207 is the engineered cell, population of cells, pharmaceutical composition, composition, or method of any one of embodiments 67-172, wherein the HLA-B guide RNA comprises SEQ ID NO: 69.

[0280] Embodiment 208 is the engineered cell, population of cells, pharmaceutical composition, composition, or method of any one of embodiments 67-172, wherein the HLA-B guide RNA comprises SEQ ID NO: 70.

[0281] Embodiment 209 is the engineered cell, population of cells, pharmaceutical composition, composition, or method of any one of embodiments 67-172, wherein the HLA-B guide RNA comprises SEQ ID NO: 71.

[0282] Embodiment 210 is the engineered cell, population of cells, pharmaceutical composition, composition, or method of any one of embodiments 67-172, wherein the HLA-B guide RNA comprises SEQ ID NO: 73.

[0283] Embodiment 211 is the engineered cell, population of cells, pharmaceutical composition, composition, or method of any one of embodiments 67-172, wherein the HLA-B guide RNA comprises SEQ ID NO: 74.

[0284] Embodiment 212 is the engineered cell, population of cells, pharmaceutical composition, composition, or method of any one of embodiments 67-172, wherein the HLA-B guide RNA comprises SEQ ID NO: 80.

[0285] Embodiment 213 is the engineered cell, population of cells, pharmaceutical composition, composition, or method of any one of embodiments 67-172, wherein the HLA-B guide RNA comprises SEQ ID NO: 81.

[0286] Embodiment 214 is the engineered cell, population of cells, pharmaceutical composition, composition, or method of any one of embodiments 67-172, wherein the HLA-B guide RNA comprises SEQ ID NO: 82.

[0287] Embodiment 215 is the engineered cell, population of cells, pharmaceutical composition, composition, or method of any one of embodiments 67-172, wherein the HLA-B guide RNA comprises SEQ ID NO: 86.

[0288] Embodiment 216 is the engineered cell, population of cells, pharmaceutical composition, composition, or method of any one of embodiments 67-172, wherein the HLA-B guide RNA comprises SEQ ID NO: 88.

[0289] Embodiment 217 is the engineered cell, population of cells, pharmaceutical composition, composition, or method of any one of embodiments 67-172, wherein the HLA-B guide RNA comprises SEQ ID NO: 89.

[0290] Embodiment 218 is the engineered cell, population of cells, pharmaceutical composition, composition, or method of any one of embodiments 67-172, wherein the HLA-B guide RNA comprises SEQ ID NO: 90.

[0291] Embodiment 219 is the engineered cell, population of cells, pharmaceutical composition, composition, or method of any one of embodiments 67-172, wherein the HLA-B guide RNA comprises SEQ ID NO: 91.

[0292] Embodiment 220 is the engineered cell, population of cells, pharmaceutical composition, composition, or method of any one of embodiments 67-172, wherein the HLA-B guide RNA comprises a guide sequence selected from SEQ ID NOs: 101, 103, 106, 107, 114, 117, 118, 125-129, 133, 137, 138, 141, 143, 144, 145, 159, 160, 163, 164, 165, 166, 169, 171, 172, 173, 176, 177, 178, 179, and 180.

[0293] Embodiment 221 is the engineered cell, population of cells, pharmaceutical composition, composition, or method of any one of embodiments 67-172, wherein the HLA-B guide RNA comprises a guide sequence selected from SEQ ID NOs: 101, 103, 106, 117, 118, 125-128, 133, 137-138, 141, 143-144, 159, 163, 164, 165, 166, 169, 171, 173, 177, 178, and 180.

[0294] Embodiment 222 is the engineered cell, population of cells, pharmaceutical composition, composition, or method of any one of embodiments 67-172, wherein the HLA-B guide RNA comprises a guide sequence selected from SEQ ID NOs: 101, 106, 114, 117-118, 125-128, 133, 137-138, 141, 143-144, 159, 163, 164, 165, 166, 169, 171, 173, 177, 178, and 180.

[0295] Embodiment 223 is the engineered cell, population of cells, pharmaceutical composition, composition, or method of any one of embodiments 67-181172, wherein the HLA-B guide RNA comprises a guide sequence selected from SEQ ID NOs: 101, 117-118, 125-128, 137-138, 144, 159, 163, 164, 165, 166, 169, 177, 178, and 180.

[0296] Embodiment 224 is the engineered cell, population of cells, pharmaceutical composition, composition, or method of any one of embodiments 67-172, wherein the HLA-B guide RNA comprises a guide sequence selected from SEQ ID NOs: 101, 117, 127, 137-138, 163, 164, 165, 166, 169, and 177.

[0297] Embodiment 225 is the engineered cell, population of cells, pharmaceutical composition, composition, or method of any one of embodiments 67-172, wherein the HLA-B guide RNA comprises a guide sequence selected from SEQ ID NOs: 101, 103, 106, 107, 117, 125-129, 137, 138, 141, 143, 144, 145, 159, 160, 163, 164, 165, 166, 169, 171, 172, 173, 176, 177, 178, 179, and 180.

[0298] Embodiment 226 is the engineered cell, population of cells, pharmaceutical composition, composition, or method of any one of embodiments 67-172, wherein the HLA-B guide RNA comprises a guide sequence comprising a sequence of any one of SEQ ID NOs: 163-166, 169, and 177.

[0299] Embodiment 227 is the engineered cell, population of cells, pharmaceutical composition, composition, or method of any one of embodiments 67-172, wherein the HLA-B guide RNA comprises SEQ ID NO: 101.

[0300] Embodiment 228 is the engineered cell, population of cells, pharmaceutical composition, composition, or method of any one of embodiments 67-172, wherein the HLA-B guide RNA comprises SEQ ID NO: 103.

[0301] Embodiment 229 is the engineered cell, population of cells, pharmaceutical composition, composition, or method of any one of embodiments 67-172, wherein the HLA-B guide RNA comprises SEQ ID NO: 106.

[0302] Embodiment 230 is the engineered cell, population of cells, pharmaceutical composition, composition, or method of any one of embodiments 67-172, wherein the HLA-B guide RNA comprises SEQ ID NO: 107.

[0303] Embodiment 231 is the engineered cell, population of cells, pharmaceutical composition, composition, or method of any one of embodiments 67-172, wherein the HLA-B guide RNA comprises SEQ ID NO: 117.

[0304] Embodiment 232 is the engineered cell, population of cells, pharmaceutical composition, composition, or method of any one of embodiments 67-172, wherein the HLA-B guide RNA comprises SEQ ID NO: 125.

[0305] Embodiment 233 is the engineered cell, population of cells, pharmaceutical composition, composition, or method of any one of embodiments 67-172, wherein the HLA-B guide RNA comprises SEQ ID NO: 126.

[0306] Embodiment 234 is the engineered cell, population of cells, pharmaceutical composition, composition, or method of any one of embodiments 67-172, wherein the HLA-B guide RNA comprises SEQ ID NO: 127.

[0307] Embodiment 235 is the engineered cell, population of cells, pharmaceutical composition, composition, or method of any one of embodiments 67-172, wherein the HLA-B guide RNA comprises SEQ ID NO: 128.

[0308] Embodiment 236 is the engineered cell, population of cells, pharmaceutical composition, composition, or method of any one of embodiments 67-172, wherein the HLA-B guide RNA comprises SEQ ID NO: 129.

[0309] Embodiment 237 is the engineered cell, population of cells, pharmaceutical composition, composition, or method of any one of embodiments 67-172, wherein the HLA-B guide RNA comprises SEQ ID NO: 137.

[0310] Embodiment 238 is the engineered cell, population of cells, pharmaceutical composition, composition, or method of any one of embodiments 67-172, wherein the HLA-B guide RNA comprises SEQ ID NO: 138.

[0311] Embodiment 239 is the engineered cell, population of cells, pharmaceutical composition, composition, or method of any one of embodiments 67-172, wherein the HLA-B guide RNA comprises SEQ ID NO: 141.

[0312] Embodiment 240 is the engineered cell, population of cells, pharmaceutical composition, composition, or method of any one of embodiments 67-172, wherein the HLA-B guide RNA comprises SEQ ID NO: 143.

[0313] Embodiment 241 is the engineered cell, population of cells, pharmaceutical composition, composition, or method of any one of embodiments 67-172, wherein the HLA-B guide RNA comprises SEQ ID NO: 144.

[0314] Embodiment 242 is the engineered cell, population of cells, pharmaceutical composition, composition, or method of any one of embodiments 67-172, wherein the HLA-B guide RNA comprises SEQ ID NO: 145.

[0315] Embodiment 243 is the engineered cell, population of cells, pharmaceutical composition, composition, or method of any one of embodiments 67-172, wherein the HLA-B guide RNA comprises SEQ ID NO: 159.

[0316] Embodiment 244 is the engineered cell, population of cells, pharmaceutical composition, composition, or method of any one of embodiments 67-172, wherein the HLA-B guide RNA comprises SEQ ID NO: 160.

[0317] Embodiment 245 is the engineered cell, population of cells, pharmaceutical composition, composition, or method of any one of embodiments 67-172, wherein the HLA-B guide RNA comprises SEQ ID NO: 163.

[0318] Embodiment 246 is the engineered cell, population of cells, pharmaceutical composition, composition, or method of any one of embodiments 67-172, wherein the HLA-B guide RNA comprises SEQ ID NO: 164.

[0319] Embodiment 247 is the engineered cell, population of cells, pharmaceutical composition, composition, or method of any one of embodiments 67-172, wherein the HLA-B guide RNA comprises SEQ ID NO: 165.

[0320] Embodiment 248 is the engineered cell, population of cells, pharmaceutical composition, composition, or method of any one of embodiments 67-172, wherein the HLA-B guide RNA comprises SEQ ID NO: 166.

[0321] Embodiment 249 is the engineered cell, population of cells, pharmaceutical composition, composition, or method of any one of embodiments 67-172, wherein the HLA-B guide RNA comprises SEQ ID NO: 169.

[0322] Embodiment 250 is the engineered cell, population of cells, pharmaceutical composition, composition, or method of any one of embodiments 67-172, wherein the HLA-B guide RNA comprises SEQ ID NO: 171.

[0323] Embodiment 251 is the engineered cell, population of cells, pharmaceutical composition, composition, or method of any one of embodiments 67-172, wherein the HLA-B guide RNA comprises SEQ ID NO: 172.

[0324] Embodiment 252 is the engineered cell, population of cells, pharmaceutical composition, composition, or method of any one of embodiments 67-172, wherein the HLA-B guide RNA comprises SEQ ID NO: 173.

[0325] Embodiment 253 is the engineered cell, population of cells, pharmaceutical composition, composition, or method of any one of embodiments 67-172, wherein the HLA-B guide RNA comprises SEQ ID NO: 176.

[0326] Embodiment 254 is the engineered cell, population of cells, pharmaceutical composition, composition, or method of any one of embodiments 67-172, wherein the HLA-B guide RNA comprises SEQ ID NO: 177.

[0327] Embodiment 255 is the engineered cell, population of cells, pharmaceutical composition, composition, or method of any one of embodiments 67-172, wherein the HLA-B guide RNA comprises SEQ ID NO: 178.

[0328] Embodiment 256 is the engineered cell, population of cells, pharmaceutical composition, composition, or method of any one of embodiments 67-172, wherein the HLA-B guide RNA comprises SEQ ID NO: 179.

[0329] Embodiment 257 is the engineered cell, population of cells, pharmaceutical composition, composition, or method of any one of embodiments 67-172, wherein the HLA-B guide RNA comprises SEQ ID NO: 180.

[0330] Embodiment 258 is the engineered cell, population of cells, pharmaceutical composition, composition, or method of any one of embodiments 67-172, wherein the HLA-B guide RNA comprises the sequence of any one of SEQ ID NOs: 2186-2191.

[0331] Embodiment 259 is the engineered cell, population of cells, pharmaceutical composition, composition, or method of any one of embodiments 67-172, wherein the HLA-B guide RNA comprises SEQ ID NO: 2186.

[0332] Embodiment 260 is the engineered cell, population of cells, pharmaceutical composition, composition, or method of any one of embodiments 67-172, wherein the HLA-B guide RNA comprises SEQ ID NO: 2187.

[0333] Embodiment 261 is the engineered cell, population of cells, pharmaceutical composition, composition, or method of any one of embodiments 67-172, wherein the HLA-B guide RNA comprises SEQ ID NO: 2188.

[0334] Embodiment 262 is the engineered cell, population of cells, pharmaceutical composition, composition, or method of any one of embodiments 67-172, wherein the HLA-B guide RNA comprises SEQ ID NO: 2189.

[0335] Embodiment 263 is the engineered cell, population of cells, pharmaceutical composition, composition, or method of any one of embodiments 67-172, wherein the HLA-B guide RNA comprises SEQ ID NO: 2190.

[0336] Embodiment 264 is the engineered cell, population of cells, pharmaceutical composition, composition, or method of any one of embodiments 67-172, wherein the HLA-B guide RNA comprises SEQ ID NO: 2191.

[0337] Embodiment 265 is the engineered cell, population of cells, pharmaceutical composition, or method of any one of embodiments 67-264, wherein the HLA-A guide RNA comprises SEQ ID NO: 313 or 314.

[0338] Embodiment 266 is the engineered cell, population of cells, pharmaceutical composition, or method of any one of embodiments 67-264, wherein the HLA-A guide RNA comprises SEQ ID NO: 314.

[0339] Embodiment 267 is the engineered cell, population of cells, pharmaceutical composition, or method of any one of embodiments 67-264, wherein the HLA-A guide RNA comprises SEQ ID NO: 315.

[0340] Embodiment 268 is the engineered cell, population of cells, pharmaceutical composition, or method of any one of embodiments 67-264, wherein the HLA-A guide RNA comprises SEQ ID NO: 316.

[0341] Embodiment 269 is the engineered cell, population of cells, pharmaceutical composition, or method of any one of embodiments 67-264, wherein the HLA-A guide RNA comprises SEQ ID NO: 317.

[0342] Embodiment 270 is the engineered cell, population of cells, pharmaceutical composition, or method of any one of embodiments 67-264, wherein the HLA-A guide RNA comprises SEQ ID NO: 318.

[0343] Embodiment 271 is the engineered cell, population of cells, pharmaceutical composition, or method of any one of embodiments 67-264, wherein the HLA-A guide RNA comprises SEQ ID NO: 326.

[0344] Embodiment 272 is the engineered cell, population of cells, pharmaceutical composition, or method of any one of embodiments 67-264, wherein the HLA-A guide RNA comprises SEQ ID NO: 337.

[0345] Embodiment 273 is the engineered cell, population of cells, pharmaceutical composition, or method of any one of embodiments 67-264, wherein the HLA-A guide RNA comprises SEQ ID NO: 338.

[0346] Embodiment 274 is the engineered cell, population of cells, pharmaceutical composition, or method of any one of embodiments 67-264, wherein the HLA-A guide RNA comprises SEQ ID NO: 339.

[0347] Embodiment 275 is the engineered cell, population of cells, pharmaceutical composition, or method of any one of embodiments 67-264, wherein the HLA-A guide RNA comprises SEQ ID NO: 341.

[0348] Embodiment 276 is the engineered cell, population of cells, pharmaceutical composition, or method of any one of embodiments 67-264, wherein the HLA-A guide RNA comprises SEQ ID NO: 343.

[0349] Embodiment 277 is the engineered cell, population of cells, pharmaceutical composition, or method of any one of embodiments 67-264, wherein the HLA-A guide RNA comprises SEQ ID NO: 345.

[0350] Embodiment 278 is the engineered cell, population of cells, pharmaceutical composition, or method of any one of embodiments 67-264, wherein the HLA-A guide RNA comprises SEQ ID NO: 362.

[0351] Embodiment 279 is the engineered cell, population of cells, pharmaceutical composition, or method of any one of embodiments 67-257 wherein the HLA-A guide RNA comprises SEQ ID NO: 576.

[0352] Embodiment 280 is the engineered cell, population of cells, pharmaceutical composition, or method of any one of embodiments 67-257 wherein the HLA-A guide RNA comprises SEQ ID NO: 571.

[0353] Embodiment 281 is the engineered cell, population of cells, pharmaceutical composition, composition, or method of any one of embodiments 1-280, for use to express a TCR with specificity for a polypeptide expressed by cancer cells.

[0354] Embodiment 282 is the engineered cell, population of cells, pharmaceutical composition, composition, or method of any one of embodiments 1-281, for use in administering to a subject as an adoptive cell transfer (ACT) therapy.

[0355] Embodiment 283 is the engineered cell, population of cells, pharmaceutical composition, composition, or method of any one of embodiments 1-282, for use in treating a subject with cancer.

[0356] Embodiment 284 is the engineered cell, population of cells, pharmaceutical composition, composition, or method of any one of embodiments 1-283, for use in treating a subject with an infectious disease.

[0357] Embodiment 285 is the engineered cell, population of cells, pharmaceutical composition, composition, or method of any one of embodiments 1-284, for use in treating a subject with an autoimmune disease.

[0358] Embodiment 286 is a cell bank comprising: (a) the engineered cells of any one of embodiments 1-56, 73-75, 94-285, or the engineered cells produced by the method of any one of embodiments 69-285; and (b) a catalogue comprising information documenting the HLA-A and HLA-C alleles of the donor cells in the cell bank.

[0359] Embodiment 287 is the cell bank of embodiment 286, wherein the cell bank comprises at least 3, 4, 5, 6, 7, 8, 9, 10, 11, 12, 13, 14, 15, 16, 17, 18, 19, 20, 25, 30, 35, or 40 donor cells that have a unique combination of HLA-A and HLA-C alleles as compared to other donor cells in the cell bank.

[0360] Embodiment 288 is a method of administering an engineered cell to a recipient subject in need thereof, the method comprising: (a) determining the HLA-A and HLA-C alleles of the recipient subject; (b) selecting an engineered cell or cell population of embodiments 1-56, 58, 60-63, 73-75, 94-285, or an engineered cell or cell population produced by the method of any one of embodiments 69-285, wherein the engineered cell comprises at least one of the same HLA-A or HLA-C alleles as the recipient subject; (c) administering the selected engineered cell to the recipient subject.

[0361] Embodiment 289 is the method of embodiment 288, wherein the subject has the HLA-A and HLA-C alleles of the engineered cell.

[0362] Embodiment 290 is the engineered cell, population, composition, pharmaceutical composition, or method of any one of embodiments 1-285, for use in administering to a partially matched subject for an adoptive cell transfer (ACT) therapy, wherein the partially matched subject has the HLA-A and HLA-C alleles of the engineered cell or cell population.

[0363] Embodiment 291 is the engineered cell, population, composition, pharmaceutical composition, or method of any one of embodiments 64-290, wherein the engineered cell or cell population comprises HLA-A and HLA-C alleles shared with the subject.

[0364] Embodiment 292 is the engineered cell, population, composition, pharmaceutical composition, or method of any one of embodiments 64-290, wherein the HLA-A and HLA-C alleles of the engineered cell or cell population consist of alleles that match one or more HLA-A and HLA-C alleles of the subject.

[0365] Embodiment 293 is the engineered cell, population, composition, pharmaceutical composition, or method of any one of the preceding embodiments 64-290, wherein the HLA-C alleles of the engineered cell or cell population consist of alleles that match one or both HLA-C alleles of the subject.

[0366] Embodiment 294 is a cell bank comprising: (a) the engineered cells of any one of embodiments 1-56, 73-75, 94-285, or the engineered cells produced by the method of any one of any one of embodiments 69-285; and (b) a catalogue comprising information documenting the HLA-C alleles of the donor cells in the cell bank.

[0367] Embodiment 295 is a method of administering an engineered cell to a recipient subject in need thereof, the method comprising: (a) determining the HLA-C alleles of the recipient subject; (b) selecting an engineered cell or cell population of any one of embodiments 1-56, 58, 60-63, 73-75, 94-285, or engineered cell or cell population produced by the method of any one of embodiments 69-285, wherein the engineered cell is homozygous for one of the HLA-C alleles of the recipient subject; (c) administering the selected engineered cell to the recipient subject.

[0368] Embodiment 296 is the method of embodiment 295, wherein the subject is homozygous or heterozygous for the HLA-C allele of the engineered cell.

[0369] Embodiment 297 is the engineered cell, population, composition, pharmaceutical composition, or method of any one of embodiments 1-285, for use in administering to a partially matched subject for an adoptive cell transfer (ACT) therapy, wherein the partially matched subject is homozygous or heterozygous for the HLA-C allele of the engineered cell or cell population.

[0370] Embodiment 298 is the engineered cell, population, composition, pharmaceutical composition, or method of any one of embodiments 64-297, wherein the engineered cell or cell population comprises HLA-C alleles shared with the subject.

[0371] Embodiment 299 is the engineered cell, population, composition, pharmaceutical composition, or method of any one of embodiments 64-298, wherein the HLA-C alleles of the engineered cell or cell population consist of alleles that match one or more HLA-C alleles of the subject.

[0372] Embodiment 300 is the engineered cell, population, composition, pharmaceutical composition, or method of any one of embodiments 64-299, wherein the HLA-C alleles of the engineered cell or cell population consist of alleles that match one or both HLA-C alleles of the subject.

### A. Definitions

[0373] Unless stated otherwise, the following terms and phrases as used herein are intended to have the following meanings:

[0374] The term “or combinations thereof” as used herein refers to all permutations and combinations of the listed terms preceding the term. For example, “A, B, C, or combinations thereof” is intended to include at least one of: A, B, C, AB, AC, BC, or ABC, and if order is important in a particular context, also BA, CA, CB, ACB, CBA, BCA, BAC, or CAB. Continuing with this example, expressly included are combinations that contain repeats of one or more item or term, such as BB, AAA, AAB, BBC, CBBA, CABA, and so forth. The skilled artisan will understand that typically there is no limit on the number of items or terms in any combination, unless otherwise apparent from the context.

[0375] As used herein, the term “kit” refers to a packaged set of related components, such as one or more polynucleotides or compositions and one or more related materials such as delivery devices (e.g., syringes), solvents, solutions, buffers, instructions, or desiccants.

[0376] An “allogeneic” cell, as used herein, refers to a cell originating from a donor subject of the same species as a recipient subject, wherein the donor subject and recipient subject have genetic dissimilarity, e.g., genes at one or more loci that are not identical. Thus, e.g., a cell is allogeneic with respect to the subject to be administered the cell. As used herein, a cell that is removed or isolated from a donor, that will not be re-introduced into the original donor, is considered an allogeneic cell.

[0377] An “autologous” cell, as used herein, refers to a cell derived from the same subject to whom the material will later be re-introduced. Thus, e.g., a cell is considered autologous if it is removed from a subject and it will then be re-introduced into the same subject.

[0378] “β2M” or “B2M,” as used herein, refers to nucleic acid sequence or protein sequence of “3-2 microglobulin”; the human gene has accession number NC_000015 (range 44711492..44718877), reference GRCh38.p13. The B2M protein is associated with MHC class I molecules as a heterodimer on the surface of nucleated cells and is required for MHC class I protein expression.

[0379] “CIITA” or “CIITA” or “C2TA,” as used herein, refers to the nucleic acid sequence or protein sequence of “class II major histocompatibility complex transactivator;” the human gene has accession number NC_000016.10 (range 10866208..10941562), reference GRCh38.p13. The CIITA protein in the nucleus acts as a positive regulator of MHC class II gene transcription and is required for MHC class II protein expression.

[0380] As used herein, “MHC” or “MHC molecule(s)” or “MHC protein” or “MHC complex(es),” refers to a major histocompatibility complex molecule (or plural), and includes e.g., MHC class I and MHC class II molecules. In humans, MHC molecules are referred to as “human leukocyte antigen” complexes or “HLA molecules” or “HLA protein.” The use of terms “MHC” and “HLA” are not meant to be limiting; as used herein, the term “MHC” may be used to refer to human MHC molecules, i.e., HLA molecules. Therefore, the terms “MHC” and “HLA” are used interchangeably herein.

[0381] The term “HLA-A,” as used herein in the context of HLA-A protein, refers to the MHC class I protein molecule, which is a heterodimer consisting of a heavy chain (encoded by the HLA-A gene) and a light chain (i.e., beta-2 microglobulin). The term “HLA-A” or “HLA-A gene,” as used herein in the context of nucleic acids refers to the gene encoding the heavy chain of the HLA-A protein molecule. The HLA-A gene is also referred to as “HLA class I histocompatibility, A alpha chain;” the human gene has accession number NC_000006.12 (29942532..29945870). The HLA-A gene is known to have thousands of different genotypic versions of the HLA-A gene across the population (and an individual may receive two different alleles of the HLA-A gene). A public database for HLA-A alleles, including sequence information, may be accessed at IPD-IMGT/HLA: www.ebi.ac.uk/ipd/imgt/hla/. All alleles of HLA-A are encompassed by the terms “HLA-A” and “HLA-A gene.”

[0382] The term “HLA-B,” as used herein in the context of HLA-B protein, refers to the MHC class I protein molecule, which is a heterodimer consisting of a heavy chain (encoded by the HLA-B gene) and a light chain (i.e., beta-2 microglobulin). “HLA-B” as used herein in the context of nucleic acids refers to the gene encoding the heavy chain of the HLA-B protein molecule. The HLA-B is also referred to as “HLA class I histocompatibility, B alpha chain;” the human gene has accession number NC_000006.12 (31353875..31357179). The HLA-B gene is known to have thousands of different genotypic versions of the HLA-B gene across the population (and an individual may receive two different alleles of the HLA-A gene). A public database for HLA-B alleles, including sequence information, may be accessed at IPD-IMGT/HLA: www.ebi.ac.uk/ipd/imgt/hla/. All alleles of HLA-B are encompassed by the terms “HLA-B” and “HLA-B gene.”

[0383] “HLA-C” as used herein in the context of nucleic acids refers to the gene encoding the heavy chain of the HLA-C protein molecule. The HLA-C is also referred to as “HLA class I histocompatibility, C alpha chain;” the human gene has accession number NC_000006.12 (31268749..31272092).

[0384] As used herein, the term “within the genomic coordinates” includes the boundaries of the genomic coordinate range given. For example, if chr6:29942854-chr6:29942913 is given, the coordinates chr6:29942854-chr6:29942913 are encompassed. Throughout this application, the referenced genomic coordinates are based on genomic annotations in the GRCh38 (also referred to as hg38) assembly of the human genome from the Genome Reference Consortium, available at the National Center for Biotechnology Information website. Tools and methods for converting genomic coordinates between one assembly and another are known in the art and can be used to convert the genomic coordinates provided herein to the corresponding coordinates in another assembly of the human genome, including conversion to an earlier assembly generated by the same institution or using the same algorithm (e.g., from GRCh38 to GRCh37), and conversion of an assembly generated by a different institution or algorithm (e.g., from GRCh38 to NCBI33, generated by the International Human Genome Sequencing Consortium). Available methods and tools known in the art include, but are not limited to, NCBI Genome Remapping Service, available at the National Center for Biotechnology Information website, UCSC LiftOver, available at the UCSC Genome Brower website, and Assembly Converter, available at the Ensembl.org website.

[0385] As used herein, the term “homozygous” refers to having two identical alleles of a particular gene.

[0386] As used herein, an HLA “allele” can refer to a named HLA-A, HLA-B, or HLA-C gene wherein the first four digits (or the first two sets of digits separated by a colon, e.g., HLA-A*02:101:01:02N where the first two sets of digits are bolded and in italics) of the name following “HLA-A”, HLA-B”, or “HLA-C” are specified. As known in the art, the first four digits (or first two sets of digits separated by a colon) specify the protein of the allele. For example, HLA-A*02:01 and HLA-A*01:02 are distinct HLA-A alleles. Further genotypes of each allele exist, such as, e.g., HLA-A*02:01:02:01. Further genotypes of a given allele are considered to be identical alleles, e.g., HLA-A*02:01:02:01 and HLA-A*02:01 are identical alleles. Thus, HLA alleles are homozygous when the alleles are identical (i.e., when the alleles have the same first four digits or same first two sets of digits separated by a colon).

[0387] “Matching” or “matched” refers to shared alleles between the donor and the recipient, e.g., identical alleles.

[0388] “Polynucleotide” and “nucleic acid” are used herein to refer to a multimeric compound comprising nucleosides or nucleoside analogs which have nitrogenous heterocyclic bases or base analogs linked together along a backbone, including conventional RNA, DNA, mixed RNA-DNA, and polymers that are analogs thereof. A nucleic acid “backbone” can be made up of a variety of linkages, including one or more of sugar-phosphodiester linkages, peptide-nucleic acid bonds (“peptide nucleic acids” or PNA; PCT No. WO 95/32305), phosphorothioate linkages, methylphosphonate linkages, or combinations thereof. Sugar moieties of a nucleic acid can be ribose, deoxyribose, or similar compounds with substitutions, e.g., 2′ methoxy or 2′ halide substitutions. Nitrogenous bases can be conventional bases (A, G, C, T, U), analogs thereof (e.g., modified uridines such as 5-methoxyuridine, pseudouridine, or NT-methylpseudouridine, or others); inosine; derivatives of purines or pyrimidines (e.g., N⁴-methyl deoxyguanosine, deaza- or aza-purines, deaza- or aza-pyrimidines, pyrimidine bases with substituent groups at the 5 or 6 position (e.g., 5-methylcytosine), purine bases with a substituent at the 2, 6, or 8 positions, 2-amino-6-methylaminopurine, O⁶-methylguanine, 4-thio-pyrimidines, 4-amino-pyrimidines, 4-dimethylhydrazine-pyrimidines, and O⁴-alkyl-pyrimidines; U.S. Pat. No. 5,378,825 and PCT No. WO 93/13121). For general discussion see The Biochemistry of the Nucleic Acids 5-36, Adams et al., ed., 11^{th} ed., 1992). Nucleic acids can include one or more “abasic” residues where the backbone includes no nitrogenous base for position(s) of the polymer (U.S. Pat. No. 5,585,481). A nucleic acid can comprise only conventional RNA or DNA sugars, bases and linkages, or can include both conventional components and substitutions (e.g., conventional bases with 2′ methoxy linkages, or polymers containing both conventional bases and one or more base analogs). Nucleic acid includes “locked nucleic acid” (LNA), an analogue containing one or more LNA nucleotide monomers with a bicyclic furanose unit locked in an RNA mimicking sugar conformation, which enhance hybridization affinity toward complementary RNA and DNA sequences (Vester and Wengel, 2004, Biochemistry 43(42):13233-41). RNA and DNA have different sugar moieties and can differ by the presence of uracil or analogs thereof in RNA and thymine or analogs thereof in DNA.

[0389] “Guide RNA”, “gRNA”, and simply “guide” are used herein interchangeably to refer to, for example, the guide that directs an RNA-guided DNA binding agent to a target DNA and can be a single guide RNA, or the combination of a crRNA and a trRNA (also known as tracrRNA). Exemplary gRNAs include Class II Cas nuclease guide RNAs, in modified or unmodified forms. The crRNA and trRNA may be associated as a single RNA molecule (single guide RNA, sgRNA) or in two separate RNA strands (dual guide RNA, dgRNA). “Guide RNA” or “gRNA” refers to each type. The trRNA may be a naturally occurring sequence, or a trRNA sequence with modifications or variations compared to naturally-occurring sequences.

[0390] As used herein, a “guide sequence” refers to a sequence within a guide RNA that is complementary to a target sequence and functions to direct a guide RNA to a target sequence for binding or modification (e.g., cleavage) by an RNA-guided DNA binding agent. A “guide sequence” may also be referred to as a “targeting sequence,” or a “spacer sequence.” A guide sequence can be 20 nucleotides in length, e.g., in the case of Streptococcus pyogenes (i.e., Spy Cas9 (SpCas9)) and related Cas9 homologs/orthologs. Shorter or longer sequences can also be used as guides, e.g., 15-, 16-, 17-, 18-, 19-, 21-, 22-, 23-, 24-, or 25-nucleotides in length. In some embodiments, the target sequence is in a gene or on a chromosome, for example, and is complementary to the guide sequence. In some embodiments, the degree of complementarity or identity between a guide sequence and its corresponding target sequence may be about 75%, 80%, 85%, 90%, 95%, 96%, 97%, 98%, 99%, or 100%. In some embodiments, the guide sequence and the target region may be 100% complementary or identical. In other embodiments, the guide sequence and the target region may contain at least one mismatch. For example, the guide sequence and the target sequence may contain 1, 2, 3, or 4 mismatches, where the total length of the target sequence is at least 17, 18, 19, 20 or more nucleotides. In some embodiments, the guide sequence and the target region may contain 1-4 mismatches where the guide sequence comprises at least 17, 18, 19, 20 or more nucleotides. In some embodiments, the guide sequence and the target region may contain 1, 2, 3, or 4 mismatches where the guide sequence comprises 20 nucleotides.

[0391] Accordingly, in the case of Neisseria meningitides (i.e., Nine Cas9 (NmeCas9)) and related Cas9 homologs/orthologs, a guide sequence may be 19, 20, 21, preferably 22, 23, or 24 nucleotides in length, or may be 20-25 nucleotides in length. In some embodiments, the target sequence is in a gene or on a chromosome, for example, and is complementary to the guide sequence. In some embodiments, the degree of complementarity or identity between a guide sequence and its corresponding target sequence is at least 80%, 85%, preferably 90%, or 95%. In some embodiments, the guide sequence and the target region may be 100% complementary or identical. In other embodiments, the guide sequence and the target region may contain at least one mismatch, i.e., one nucleotide that is not identical or not complementary, depending on the reference sequence. For example, the guide sequence and the target sequence may contain 1-2, preferably no more than 1 mismatch, where the total length of the target sequence is 19, 20, 21, 22, preferably 23, or 24, nucleotides, or more. In some embodiments, the guide sequence and the target region may contain 1-2 mismatches where the guide sequence comprises at least 24 nucleotides, or more. In some embodiments, the guide sequence and the target region may contain 1-2 mismatches where the guide sequence comprises 24 nucleotides. That is, the guide sequence and the target region may form a duplex region having at least 2× base pairs, or more. In certain embodiments, the duplex region may include 1-2 mismatches such that guide strand and target sequence are not fully complementary. Mismatch positions are known in the art as provided in, for example, PAM distal mismatches tend to be better tolerated than PAM proximal matches. Mismatch tolerances at other positions are known in the art (see, e.g., Edraki et al., 2019. Mol. Cell, 73:1-13).

[0392] Target sequences for RNA-guided DNA binding agents include both the positive and negative strands of genomic DNA (i.e., the sequence given and the sequence's reverse compliment), as a nucleic acid substrate for an RNA-guided DNA binding agent is a double stranded nucleic acid. Accordingly, where a guide sequence is said to be “complementary to a target sequence”, it is to be understood that the guide sequence may direct a guide RNA to bind to the reverse complement of a target sequence. Thus, in some embodiments, where the guide sequence binds the reverse complement of a target sequence, the guide sequence is identical to certain nucleotides of the target sequence (e.g., the target sequence not including the PAM) except for the substitution of U for T in the guide sequence.

[0393] As used herein, an “RNA-guided DNA binding agent” means a polypeptide or complex of polypeptides having RNA and DNA binding activity, or a DNA-binding subunit of such a complex, wherein the DNA binding activity is sequence-specific and depends on the presence of a PAM and the sequence of the guide RNA. Exemplary RNA-guided DNA binding agents include Cas cleavases/nickases and inactivated forms thereof (“dCas DNA binding agents”). “Cas nuclease”, as used herein, encompasses Cas cleavases, Cas nickases, and dCas DNA binding agents. The dCas DNA binding agent may be a dead nuclease comprising non-functional nuclease domains (RuvC or HNH domain). In some embodiments the Cas cleavase or Cas nickase encompasses a dCas DNA binding agent modified to permit DNA cleavage, e.g. via fusion with a FokI domain. Cas cleavases/nickases and dCas DNA binding agents include a Csm or Cmr complex of a type III CRISPR system, the Cas10, Csm1, or Cmr2 subunit thereof, a Cascade complex of a type I CRISPR system, the Cas3 subunit thereof, and Class 2 Cas nucleases.

[0394] As used herein, a “Class 2 Cas nuclease” is a single-chain polypeptide with RNA-guided DNA binding activity. Class 2 Cas nucleases include Class 2 Cas cleavases/nickases (e.g., H840A or D10A variants of Spy Cas9 and D16A and H588A of Nine Cas9, e.g., Nme2 Cas9), which further have RNA-guided DNA cleavases or nickase activity, and Class 2 dCas DNA binding agents, in which cleavase/nickase activity is inactivated. Class 2 Cas nucleases include, for example, Cas9, Cpf1, C2c1, C2c2, C2c3, HF Cas9 (e.g., N497A, R661A, Q695A, Q926A variants), HypaCas9 (e.g., N692A, M694A, Q695A, H698A variants), eSPCas9(1.0) (e.g., K810A, K1003A, R1060A variants), and eSPCas9(1.1) (e.g., K848A, K1003A, R1060A variants) proteins and modifications thereof. Cpf1 protein, Zetsche et al., Cell, 163: 1-13 (2015), is homologous to Cas9, and contains a RuvC-like nuclease domain. Cpf1 sequences of Zetsche are incorporated by reference in their entirety. See, e.g., Zetsche, Tables S1 and S3. See, e.g., Makarova et al., Nat Rev Microbiol, 13(11): 722-36 (2015); Shmakov et al., Molecular Cell, 60:385-397 (2015).

[0395] Several Cas9 orthologs have been obtained from N. meningitidis (Esvelt et al., NAT. METHODS, vol. 10, 2013, 1116-1121; Hou et al., PNAS, vol. 110, 2013, pages 15644-15649) (Nme1Cas9, Nme2Cas9, and Nme3Cas9). The Nme2Cas9 ortholog functions efficiently in mammalian cells, recognizes an N4CC PAM, and can be used for in vivo editing with cognate gRNAs (Ran et al., NATURE, vol. 520, 2015, pages 186-191; Kim et al., NAT. COMMUN., vol. 8, 2017, pages 14500). Nme2Cas9 can be specific and selective, e.g. capable of low off-target editing (Lee et al., MOL. THER., vol. 24, 2016, pages 645-654; Kim et al., 2017). See also e.g., WO/2020081568 (e.g., pages 28 and 42), describing an Nme2Cas9 D16A nickase, the contents of which are hereby incorporated by reference in its entirety. Throughout, “NmeCas9” or “Nine Cas9” is generic and encompasses any type of NmeCas9, including, Nme1Cas9, Nme2Cas9, and Nme3Cas9.

[0396] As used herein, the term “editor” refers to an agent comprising a polypeptide that is capable of making a modification within a DNA sequence. In some embodiments, the editor is a cleavase, such as a Cas9 cleavase. In some embodiments, the editor is capable of deaminating a base within a DNA molecule, and it may be called a base editor. In some embodiments, the editor is capable of deaminating a cytosine (C) in DNA. In some embodiments, the editor is a fusion protein comprising an RNA-guided nickase fused to a cytidine deaminase. In some embodiments, the editor is a fusion protein comprising an RNA-guided nickase fused to an APOBEC3A deaminase (A3A). In some embodiments, the editor comprises a Cas9 nickase fused to an APOBEC3A deaminase (A3A). In some embodiments, the editor is a fusion protein comprising an RNA-guided nickase fused to a cytidine deaminase and a UGI. In some embodiments, the editor lacks a UGI.

[0397] As used herein, a “cytidine deaminase” means a polypeptide or complex of polypeptides that is capable of cytidine deaminase activity, that is catalyzing the hydrolytic deamination of cytidine or deoxycytidine, typically resulting in uridine or deoxyuridine. Cytidine deaminases encompass enzymes in the cytidine deaminase superfamily, and in particular, enzymes of the APOBEC family (APOBEC1, APOBEC2, APOBEC4, and APOBEC3 subgroups of enzymes), activation-induced cytidine deaminase (AID or AICDA) and CMP deaminases (see, e.g., Conticello et al., Mol. Biol. Evol. 22:367-77, 2005; Conticello, Genome Biol. 9:229, 2008; Muramatsu et al., J. Biol. Chem. 274: 18470-6, 1999); Carrington et al., Cells 9:1690 (2020)).

[0398] As used herein, the term “APOBEC3” refers to a APOBEC3 protein, such as an APOBEC3 protein expressed by any of the seven genes (A3A-A3H) of the human APOBEC3 locus. The APOBEC3 may have catalytic DNA or RNA editing activity. An amino acid sequence of APOBEC3A has been described (UniPROT accession ID: p31941) and is included herein as SEQ ID NO: 799. In some embodiments, the APOBEC3 protein is a human APOBEC3 protein or a wild-type protein. Variants include proteins having a sequence that differs from wild-type APOBEC3 protein by one or several mutations (i.e. substitutions, deletions, insertions), such as one or several single point substitutions. For instance, a shortened APOBEC3 sequence could be used, e.g. by deleting several N-term or C-term amino acids, preferably one to four amino acids at the C-terminus of the sequence. As used herein, the term “variant” refers to allelic variants, splicing variants, and natural or artificial mutants, which are homologous to a APOBEC3 reference sequence. The variant is “functional” in that it shows a catalytic activity of DNA or RNA editing. In some embodiments, an APOBEC3 (such as a human APOBEC3A) has a wild-type amino acid position 57 (as numbered in the wild-type sequence). In some embodiments, an APOBEC3 (such as a human APOBEC3A) has an asparagine at amino acid position 57 (as numbered in the wild-type sequence).

[0399] As used herein, a “nickase” is an enzyme that creates a single-strand break (also known as a “nick”) in double strand DNA, i.e., cuts one strand but not the other of the DNA double helix. As used herein, an “RNA-guided DNA nickase” means a polypeptide or complex of polypeptides having DNA nickase activity, wherein the DNA nickase activity is sequence-specific and depends on the sequence of the RNA. Exemplary RNA-guided DNA nickases include Cas nickases. Cas nickases include nickase forms of a Csm or Cmr complex of a type III CRISPR system, the Cas10, Csm1, or Cmr2 subunit thereof, a Cascade complex of a type I CRISPR system, the Cas3 subunit thereof, and Class 2 Cas nucleases. Class 2 Cas nickases include variants in which only one of the two catalytic domains is inactivated, which have RNA-guided DNA nickase activity. Class 2 Cas nickases include polypeptides in which either the HNH or RuvC catalytic domain is inactivated, for example, Cas9 for example, Cas9 (e.g., H840A, D10A, or N863A variants of SpyCas9 or D16A variant of NmeCas9). Exemplary amino acid substitutions in the HNH or HNH-like nuclease domain or RuvC or RuvC-like domains for N. meningitidis include Nme2Cas9 D16A (HNH nickase) and Nme2Cas9 H588A (RuvC nickase), Cpf1, C2c1, C2c2, C2c3, HF Cas9 (e.g., N497A, R661A, Q695A, Q926A variants), HypaCas9 (e.g., N692A, M694A, Q695A, H698A variants), eSPCas9(1.0) (e.g, K810A, K1003A, R1060A variants), and eSPCas9(1.1) (e.g., K848A, K1003A, R1060A variants) proteins and modifications thereof. Cpf1 protein, Zetsche et al., Cell, 163: 1-13 (2015), is homologous to Cas9, and contains a RuvC-like protein domain. Cpf1 sequences of Zetsche are incorporated by reference in their entirety. See, e.g., Zetsche, Tables S1 and S3. “Cas9” encompasses S. pyogenes (Spy) Cas9, the variants of Cas9 listed herein, and equivalents thereof. See, e.g., Makarova et al., Nat Rev Microbiol, 13(11): 722-36 (2015); Shmakov et al., Molecular Cell, 60:385-397 (2015).

[0400] As used herein, the term “fusion protein” refers to a hybrid polypeptide which comprises protein domains from at least two different proteins. One protein may be located at the amino-terminal (N-terminal) portion of the fusion protein or at the carboxy-terminal (C-terminal) protein thus forming an “amino-terminal fusion protein” or a “carboxy-terminal fusion protein,” respectively. Any of the proteins provided herein may be produced by any method known in the art. For example, the proteins provided herein may be produced via recombinant protein expression and purification, which is especially suited for fusion proteins comprising a peptide linker. Methods for recombinant protein expression and purification are well known, and include those described by Green and Sambrook, Molecular Cloning: A Laboratory Manual (4th ed., Cold Spring Harbor Laboratory Press, Cold Spring Harbor, N.Y. (2012)), the entire contents of which are incorporated herein by reference.

[0401] The term “linker,” as used herein, refers to a chemical group or a molecule linking two adjacent molecules or moieties. Typically, the linker is positioned between, or flanked by, two groups, molecules, or other moieties and connected to each one via a covalent bond. In some embodiments, the linker is an amino acid or a plurality of amino acids (e.g., a peptide or protein) such as a 16-amino acid residue “XTEN” linker, or a variant thereof (See, e.g., the Examples; and Schellenberger et al. A recombinant polypeptide extends the in vivo half-life of peptides and proteins in a tunable manner. Nat. Biotechnol. 27, 1186-1190 (2009)). In some embodiments, the XTEN linker comprises the sequence

(SEQ ID NO: 900)
SGSETPGTSESATPES,
(SEQ ID NO: 901)
SGSETPGTSESA,
or
(SEQ ID NO: 902)
SGSETPGTSESATPEGGSGGS.

[0402] As used herein, the term “uracil glycosylase inhibitor” or “UGI” refers to a protein that is capable of inhibiting a uracil-DNA glycosylase (UDG) base-excision repair enzyme.

[0403] As used herein, “open reading frame” or “ORF” of a gene refers to a sequence consisting of a series of codons that specify the amino acid sequence of the protein that the gene codes for. The ORF begins with a start codon (e.g., ATG in DNA or AUG in RNA) and ends with a stop codon, e.g., TAA, TAG or TGA in DNA or UAA, UAG, or UGA in RNA.

[0404] As used herein, “ribonucleoprotein” (RNP) or “RNP complex” refers to a guide RNA together with an RNA-guided DNA binding agent, such as a Cas nuclease, e.g., a Cas cleavase, Cas nickase, or dCas DNA binding agent (e.g., Cas9). In some embodiments, the guide RNA guides the RNA-guided DNA binding agent such as Cas9 to a target sequence, and the guide RNA hybridizes with and the agent binds to the target sequence; in cases where the agent is a cleavase or nickase, binding can be followed by cleaving or nicking.

[0405] As used herein, a first sequence is considered to “comprise a sequence with at least X % identity to” a second sequence if an alignment of the first sequence to the second sequence shows that X % or more of the positions of the second sequence in its entirety are matched by the first sequence. For example, the sequence AAGA comprises a sequence with 100% identity to the sequence AAG because an alignment would give 100% identity in that there are matches to all three positions of the second sequence. The differences between RNA and DNA (generally the exchange of uridine for thymidine or vice versa) and the presence of nucleoside analogs such as modified uridines do not contribute to differences in identity or complementarity among polynucleotides as long as the relevant nucleotides (such as thymidine, uridine, or modified uridine) have the same complement (e.g., adenosine for all of thymidine, uridine, or modified uridine; another example is cytosine and 5-methylcytosine, both of which have guanosine or modified guanosine as a complement). Thus, for example, the sequence 5′-AXG where X is any modified uridine, such as pseudouridine, N1-methyl pseudouridine, or 5-methoxyuridine, is considered 100% identical to AUG in that both are perfectly complementary to the same sequence (5′-CAU). Exemplary alignment algorithms are the Smith-Waterman and Needleman-Wunsch algorithms, which are well-known in the art. One skilled in the art will understand what choice of algorithm and parameter settings are appropriate for a given pair of sequences to be aligned; for sequences of generally similar length and expected identity >50% for amino acids or >75% for nucleotides, the Needleman-Wunsch algorithm with default settings of the Needleman-Wunsch algorithm interface provided by the EBI at the www.ebi.ac.uk web server is generally appropriate.

[0406] “mRNA” is used herein to refer to a polynucleotide and comprises an open reading frame that can be translated into a polypeptide (i.e., can serve as a substrate for translation by a ribosome and amino-acylated tRNAs). mRNA can comprise a phosphate-sugar backbone including ribose residues or analogs thereof, e.g., 2′-methoxy ribose residues. In some embodiments, the sugars of an mRNA phosphate-sugar backbone consist essentially of ribose residues, 2′-methoxy ribose residues, or a combination thereof.

[0407] As used herein, “indel” refers to an insertion or deletion mutation consisting of a number of nucleotides that are either inserted, deleted, or inserted and deleted, e.g. at the site of double-stranded breaks (DSBs), in a target nucleic acid. As used herein, when indel formation results in an insertion, the insertion is a random insertion at the site of a DSB and is not generally directed by or based on a template sequence.

[0408] As used herein, “reduced or eliminated” expression of a protein on a cell refers to a partial or complete loss of expression of the protein relative to an unmodified cell. In some embodiments, the surface expression of a protein on a cell is measured by flow cytometry and has “reduced” or “eliminated” surface expression relative to an unmodified cell as evidenced by a reduction in fluorescence signal upon staining with the same antibody against the protein. A cell that has “reduced” or “eliminated” surface expression of a protein by flow cytometry relative to an unmodified cell may be referred to as “negative” for expression of that protein as evidenced by a fluorescence signal similar to a cell stained with an isotype control antibody. The “reduction” or “elimination” of protein expression can be measured by other known techniques in the field with appropriate controls known to those skilled in the art.

[0409] As used herein, “knockdown” refers to a decrease in expression of a particular gene product (e.g., protein, mRNA, or both), e.g., as compared to expression of an unedited target sequence. Knockdown of a protein can be measured by detecting total cellular amount of the protein from a sample, such as a tissue, fluid, or cell population of interest. It can also be measured by measuring a surrogate, marker, or activity for the protein. Methods for measuring knockdown of mRNA are known and include analyzing mRNA isolated from a sample of interest. In some embodiments, “knockdown” may refer to some loss of expression of a particular gene product, for example a decrease in the amount of mRNA transcribed or a decrease in the amount of protein expressed by a cell or population of cells (including in vivo populations such as those found in tissues).

[0410] As used herein, “knockout” (or “KO”) refers to a loss of expression from a particular gene or of a particular protein in a cell. Knockout can result in a decrease in expression below the level of detection of the assay. Knockout can be measured either by detecting total cellular amount of a protein in a cell, a tissue or a population of cells.

[0411] As used herein, a “target sequence” or “genomic target sequence” refers to a sequence of nucleic acid in a target gene that has complementarity to the guide sequence of the gRNA. The interaction of the target sequence and the guide sequence directs an RNA-guided DNA binding agent to bind, and potentially nick or cleave (depending on the activity of the agent), within the target sequence.

[0412] As used herein, “treatment” refers to any administration or application of a therapeutic for disease or disorder in a subject, and includes inhibiting the disease, arresting its development, relieving one or more symptoms of the disease, curing the disease, or preventing one or more symptoms of the disease, including recurrence of the symptom.

[0413] Reference will now be made in detail to certain embodiments of the invention, examples of which are illustrated in the accompanying drawings. While the invention is described in conjunction with the illustrated embodiments, it will be understood that they are not intended to limit the invention to those embodiments. On the contrary, the invention is intended to cover all alternatives, modifications, and equivalents, which may be included within the invention as defined by the appended claims and included embodiments.

[0414] Before describing the present teachings in detail, it is to be understood that the disclosure is not limited to specific compositions or process steps, as such may vary. It should be noted that, as used in this specification and the appended claims, the singular form “a”, “an” and “the” include plural references unless the context clearly dictates otherwise. Thus, for example, reference to “a conjugate” includes a plurality of conjugates and reference to “a cell” includes a plurality of cells and the like.

[0415] Numeric ranges are inclusive of the numbers defining the range. Measured and measurable values are understood to be approximate, taking into account significant digits and the error associated with the measurement. Also, the use of “comprise”, “comprises”, “comprising”, “contain”, “contains”, “containing”, “include”, “includes”, and “including” are not intended to be limiting. It is to be understood that both the foregoing general description and detailed description are exemplary and explanatory only and are not restrictive of the teachings.

[0416] Unless specifically noted in the specification, embodiments in the specification that recite “comprising” various components are also contemplated as “consisting of” or “consisting essentially of” the recited components; embodiments in the specification that recite “consisting of” various components are also contemplated as “comprising” or “consisting essentially of” the recited components; and embodiments in the specification that recite “consisting essentially of” various components are also contemplated as “consisting of” or “comprising” the recited components (this interchangeability does not apply to the use of these terms in the claims). The term “or” is used in an inclusive sense, i.e., equivalent to “and/or,” unless the context clearly indicates otherwise.

[0417] The section headings used herein are for organizational purposes only and are not to be construed as limiting the desired subject matter in any way. In the event that any material incorporated by reference contradicts any term defined in this specification or any other express content of this specification, this specification controls. While the present teachings are described in conjunction with various embodiments, it is not intended that the present teachings be limited to such embodiments. On the contrary, the present teachings encompass various alternatives, modifications, and equivalents, as will be appreciated by those of skill in the art.

### B. Genetically Modified Cells

### 1. Engineered Human Cell Compositions

[0418] The present disclosure provides engineered human cell compositions which have reduced or eliminated surface expression of HLA-B protein relative to an unmodified cell, comprising a genetic modification in the HLA-B gene, wherein the cell is homozygous for HLA-A and homozygous for HLA-C. Additionally, the disclosure provides engineered human cell compositions which have reduced or eliminated surface expression of HLA-A and HLA-B protein relative to an unmodified cell, comprising (i) a genetic modification in the HLA-A gene and (ii) a genetic modification in the HLA-B gene, wherein the cell is homozygous for HLA-C. In some embodiments, the engineered human cell is an allogeneic cell. In some embodiments, the engineered human cell with reduced or eliminated HLA-B expression or HLA-A and HLA-B expression is useful for adoptive cell transfer therapies. In some embodiments, the engineered human cell comprises additional genetic modifications in the genome of the cell (e.g., reducing or elimination of MHC class II proteins, or reducing or eliminating endogenous T cell receptor (TCR) proteins, or introduction of an exogenous nucleic acid for expression) to yield a cell that is desirable for allogeneic transplant purposes.

[0419] In some embodiments, the engineered human cell is an allogeneic cell therapy. In some embodiments, the engineered human cell is transferred to a recipient that has the same HLA-A allele as the engineered human cell. In some embodiments, the engineered human cell is transferred to a recipient that has the same HLA-C allele as the engineered human cell. In some embodiments, the engineered human cell is transferred to a recipient that has the same HLA-A and HLA-C alleles as the engineered human cell. Thus, the engineered human cells disclosed herein provide a partial HLA match to a recipient, thereby reducing the risk of an adverse immune response.

[0420] In some embodiments, an engineered human cell is provided which has reduced or eliminated surface expression of HLA-B protein relative to an unmodified cell, comprising a genetic modification in the HLA-B gene, wherein the cell is homozygous for HLA-A and HLA-C.

[0421] In some embodiments, an engineered human cell is provided which has reduced or eliminated surface expression of HLA-A and HLA-B protein relative to an unmodified cell, comprising a genetic modification in the HLA-B gene, wherein the cell is homozygous for HLA-C.

[0422] In some embodiments, an engineered human cell is provided which has reduced or eliminated surface expression of HLA-B protein relative to an unmodified cell, comprising a genetic modification in the HLA-B gene, wherein the genetic modification comprises at least one nucleotide within the genomic coordinates chosen from (a) chr6:31354480-31357174 or (b) chr6:31357084-31354647; wherein the cell is homozygous for HLA-A and HLA-C.

[0423] In some embodiments, an engineered human cell is provided which has reduced or eliminated surface expression of HLA-A and HLA-B protein relative to an unmodified cell, comprising a genetic modification in the HLA-A and HLA-B genes, (i) wherein the genetic modification in HLA-A comprises at least one nucleotide within the genomic coordinates chosen from chr6:29942854-chr6:29942913 and chr6:29943518-chr6:29943619; and (ii) wherein the genetic modification in HLA-B comprises at least one nucleotide within the genomic coordinates chosen from: (a) chr6:31354480-31357174 or (b) chr6: 31354623-31357108 or 31354497-31357157; and wherein the cell is homozygous for HLA-C.

[0424] In some embodiments, for each given range of genomic coordinates, a range may encompass +/−10 nucleotides on either end of the specified coordinates. For example, if chr6:29942854-chr6:29942913 is given, in some embodiments the genomic target sequence or genetic modification may fall within chr6:29942844-chr6:29942923. In some embodiments, for each given range of genomic coordinates, the range may encompass +/−5 nucleotides on either end of the range.

[0425] In some embodiments, a given range of genomic coordinates may comprise a target sequence on both strands of the DNA (i.e., the plus (+) strand and the minus (−) strand).

[0426] Genetic modifications in the HLA-A or HLA-B gene are described further herein. In some embodiments, a genetic modification in the HLA-A or HLA-B genes comprises any one or more of an insertion, deletion, substitution, or deamination of at least one nucleotide in a target sequence.

[0427] The engineered human cells described herein may comprise a genetic modification in any HLA-B allele of the HLA-B gene or a genetic modification in any HLA-A allele of the HLA-A gene. The HLA gene is located in chromosome 6 in a genomic region referred to as the HLA superlocus; hundreds of HLA-A and HLA-B alleles have been reported in the art (see e.g., Shiina et al., Journal of Human Genetics 54:15-39 (2009). Sequences for HLA-A and HLA-B alleles are available in the art (see e.g., IPD-IMGT/HLA database for retrieving sequences of specific HLA-A and HLA-B alleles https://www.ebi.ac.uk/ipd/imgt/hla/allele.html).

[0428] In some embodiments, the cell has reduced or eliminated expression of at least one HLA-A allele selected from: HLA-A1, HLA-A2, HLA-A3, HLA-AT1, and HLA-A24. In some embodiments, the cell has reduced or eliminated expression of HLA-A1. In some embodiments, the cell has reduced or eliminated expression of HLA-A2. In some embodiments, the cell has reduced or eliminated expression of HLA-A3. In some embodiments, the cell has reduced or eliminated expression of HLA-A11. In some embodiments, the cell has reduced or eliminated expression of HLA-A24.

[0429] In some embodiments, the cell has reduced or eliminated expression of at least one HLA-B allele selected from: HLA-B7, HLA-B8, HLA-B13, HLA-B21, HLA-B27, HLA-B35, HLA-B37, HLA-B38, HLA-B39, HLA-B40, HLA-B41, HLA-B42, HLA-B44, HLA-B45, HLA-B46, HLA-B47, HLA-B48, HLA-B49, HLA-B50, HLA-B51, HLA-B52, HLA-B56, HLA-B67, HLA-B73, HLA-B81, and HLA-B83. In some embodiments, the cell has reduced or eliminated expression of HLA-B7. In some embodiments, the cell has reduced or eliminated expression of HLA-B8. In some embodiments, the cell has reduced or eliminated expression of HLA-B13. In some embodiments, the cell has reduced or eliminated expression of HLA-B21. In some embodiments, the cell has reduced or eliminated expression of HLA-B27. In some embodiments, the cell has reduced or eliminated expression of HLA-B35. In some embodiments, the cell has reduced or eliminated expression of HLA-B37. In some embodiments, the cell has reduced or eliminated expression of HLA-B38. In some embodiments, the cell has reduced or eliminated expression of HLA-B39. In some embodiments, the cell has reduced or eliminated expression of HLA-B40. In some embodiments, the cell has reduced or eliminated expression of HLA-B41. In some embodiments, the cell has reduced or eliminated expression of HLA-B42. In some embodiments, the cell has reduced or eliminated expression of HLA-B44. In some embodiments, the cell has reduced or eliminated expression of HLA-B45. In some embodiments, the cell has reduced or eliminated expression of HLA-B46. In some embodiments, the cell has reduced or eliminated expression of HLA-B47. In some embodiments, the cell has reduced or eliminated expression of HLA-B48. In some embodiments, the cell has reduced or eliminated expression of HLA-B49. In some embodiments, the cell has reduced or eliminated expression of HLA-B50. In some embodiments, the cell has reduced or eliminated expression of HLA-B51. In some embodiments, the cell has reduced or eliminated expression of HLA-B52. In some embodiments, the cell has reduced or eliminated expression of HLA-B56. In some embodiments, the cell has reduced or eliminated expression of HLA-B57. In some embodiments, the cell has reduced or eliminated expression of HLA-B67. In some embodiments, the cell has reduced or eliminated expression of HLA-B73. In some embodiments, the cell has reduced or eliminated expression of HLA-B81. In some embodiments, the cell has reduced or eliminated expression of HLA-B83.

[0430] In some embodiments, an engineered human cell is provided which has reduced or eliminated surface expression of HLA-B protein relative to an unmodified cell, comprising a genetic modification in the HLA-B gene, wherein the genetic modification comprises at least one nucleotide within the genomic coordinates chosen from: chr6:31355182-31355202; chr6:31355348-31355368; chr6:31355145-31355165; chr6:31355349-31355369; chr6:31356381-31356401; chr6:31356380-31356400; chr6:31355204-31355224; chr6:31355205-31355225; chr6:31355191-31355211; chr6:31355192-31355212; chr6:31355193-31355213; chr6:31355198-31355218; chr6:31355320-31355340; chr6:31355319-31355339; chr6:31355347-31355367; chr6:31355432-31355452; chr6:31355340-31355360; chr6:31355410-31355430; chr6:31355414-31355434; or chr6:31355409-31355429.

[0431] In some embodiments, an engineered human cell is provided which has reduced or eliminated surface expression of HLA-B protein relative to an unmodified cell, comprising a genetic modification in the HLA-B gene, wherein the genetic modification comprises at least one nucleotide within the genomic coordinates chosen from: chr6:31355182-31355202; chr6:31355349-31355369; chr6:31355348-31355368; or chr6:31355145-31355165.

[0432] In some embodiments, an engineered human cell is provided which has reduced or eliminated surface expression of HLA-B protein relative to an unmodified cell, comprising a genetic modification in the HLA-B gene, wherein the genetic modification comprises at least one nucleotide within the genomic coordinates chosen from: chr6:31355348-31355368; chr6:31355349-31355369; chr6:31356381-31356401; chr6:31356380-31356400; chr6:31355204-31355224; chr6:31355205-31355225; chr6:31355191-31355211; chr6:31355192-31355212; chr6:31355193-31355213; chr6:31355198-31355218; chr6:31355320-31355340; chr6:31355319-31355339; chr6:31355182-31355202; chr6:31355178-31355198; chr6:31355347-31355367; chr6:31355145-31355165; chr6:31355432-31355452; chr6:31355340-31355360; or chr6:31355414-31355434.

[0433] In some embodiments, an engineered human cell is provided which has reduced or eliminated surface expression of HLA-B protein relative to an unmodified cell, comprising a genetic modification in the HLA-B gene, wherein the genetic modification comprises at least one nucleotide within the genomic coordinates chosen from: chr6:31355348-31355368; chr6:31355349-31355369; chr6:31356381-31356401; chr6:31356380-31356400; chr6:31355205-31355225; chr6:31355191-31355211; chr6:31355192-31355212; chr6:31355193-31355213; chr6:31355198-31355218; chr6:31355320-31355340; chr6:31355319-31355339; chr6:31355182-31355202; chr6:31355178-31355198; chr6:31355347-31355367; chr6:31355145-31355165; chr6:31355432-31355452; chr6:31355340-31355360; chr6:31355410-31355430; chr6:31355414-31355434; or chr6:31355409-31355429.

[0434] In some embodiments, an engineered human cell is provided which has reduced or eliminated surface expression of HLA-B protein relative to an unmodified cell, comprising a genetic modification in the HLA-B gene, wherein the genetic modification comprises at least one nucleotide within the genomic coordinates chosen from: chr6:31355348-31355368, chr6:31355349-31355369, chr6:31355192-31355212, chr6:31355347-31355367, chr6:31355340-31355360, chr6:31355409-31355429.

[0435] In some embodiments, an engineered human cell is provided which has reduced or eliminated surface expression of HLA-B protein relative to an unmodified cell, comprising a genetic modification in the HLA-B gene, wherein the genetic modification comprises at least one nucleotide within the genomic coordinates chosen from: chr6:31355349-31355369 or chr6:31355348-31355368.

[0436] In some embodiments, an engineered human cell is provided which has reduced or eliminated surface expression of HLA-B protein relative to an unmodified cell, comprising a genetic modification in the HLA-B gene, wherein the genetic modification comprises at least one nucleotide within the genomic coordinates chosen from: chr6:31355192-31355212 or chr6:31355347-31355367.

[0437] In some embodiments, an engineered human cell is provided which has reduced or eliminated surface expression of HLA-B protein relative to an unmodified cell, comprising a genetic modification in the HLA-B gene, wherein the genetic modification comprises at least one nucleotide within the genomic coordinates chosen from: chr6:31355347-31355367; chr6:31355340-31355360; or chr6:31355409-31355429.

[0438] In some embodiments, an engineered human cell is provided which has reduced or eliminated surface expression of HLA-B protein relative to an unmodified cell, comprising a genetic modification in the HLA-B gene, wherein the genetic modification comprises at least one nucleotide within the genomic coordinates chosen from: chr6:31355348-31355368; chr6:31355145-31355165; chr6:31355347-31355367; chr6:31355432-31355452; or chr6:31355340-31355360.

[0439] In some embodiments, an engineered human cell is provided which has reduced or eliminated surface expression of HLA-B protein relative to an unmodified cell, comprising a genetic modification in the HLA-B gene, wherein the genetic modification comprises at least one nucleotide within the genomic coordinates chosen from: chr6:31355182-31355202; chr6:31355348-31355368; chr6:31355180-31355200; chr6:31355145-31355165; chr6:31355349-31355369; chr6:31355157-31355177; chr6:31356381-31356401; chr6:31356380-31356400; chr6:31355204-31355224; chr6:31355205-31355225; chr6:31355185-31355205; chr6:31355191-31355211; chr6:31355192-31355212; chr6:31355190-31355210; chr6:31355193-31355213; chr6:31355198-31355218; chr6:31355320-31355340; chr6:31355319-31355339; chr6:31355178-31355198; chr6:31355347-31355367; chr6:31355432-31355452; chr6:31355340-31355360; chr6:31355576-31355596; chr6:31355410-31355430; chr6:31355419-31355439; chr6:31355414-31355434; chr6:31355409-31355429.

[0440] In some embodiments, an engineered human cell is provided which has reduced or eliminated surface expression of HLA-B protein relative to an unmodified cell, comprising a genetic modification in the HLA-B gene, wherein the genetic modification comprises at least one nucleotide within the genomic coordinates chosen from: chr6:31356777-31356801; chr6:31355492-31355516; chr6:31355379-31355403; chr6:31355491-31355515; chr6:31355361-31355385; chr6:31355356-31355380; chr6:31355460-31355484; chr6:31357078-31357102; chr6:31355417-31355441; chr6:31355366-31355390; chr6:31355415-31355439; chr6:31355378-31355402; chr6:31355166-31355190; chr6:31355401-31355425; and chr6:31355469-31355493.

[0441] In some embodiments, an engineered human cell is provided which has reduced or eliminated surface expression of HLA-B protein relative to an unmodified cell, comprising a genetic modification in the HLA-B gene, wherein the genetic modification comprises at least one nucleotide within the genomic coordinates chosen from: chr6:31356777-31356801; chr6:31355492-31355516; chr6:31355361-31355385; chr6:31355379-31355403; chr6:31355491-31355515; chr6:31355356-31355380; chr6:31355366-31355390; chr6:31355417-31355441; chr6:31357078-31357102; chr6:31355460-31355484; chr6:31355415-31355439; chr6:31355166-31355190; chr6:31355378-31355402; chr6:31355401-31355425; chr6:31356262-31356286; chr6:31355221-31355245; chr6:31355222-31355246; chr6:31355205-31355229; chr6:31355446-31355470; chr6:31356425-31356449; chr6:31355441-31355465; chr6:31355203-31355227; chr6:31356437-31356461; chr6:31356426-31356450; chr6:31356763-31356787; or chr6:31356764-31356788.

[0442] In some embodiments, an engineered human cell is provided which has reduced or eliminated surface expression of HLA-B protein relative to an unmodified cell, comprising a genetic modification in the HLA-B gene, wherein the genetic modification comprises at least one nucleotide within the genomic coordinates chosen from: chr6:31356777-31356801; chr6:31355492-31355516; chr6:31355379-31355403; chr6:31355491-31355515; chr6:31355361-31355385; chr6:31355356-31355380; chr6:31355460-31355484; chr6:31357078-31357102; chr6:31355417-31355441; chr6:31355366-31355390; chr6:31355221-31355245; chr6:31355222-31355246; chr6:31355205-31355229; chr6:31355446-31355470; chr6:31356425-31356449; chr6:31355441-31355465; chr6:31355203-31355227; chr6:31356437-31356461; or chr6:31356426-31356450.

[0443] In some embodiments, an engineered human cell is provided which has reduced or eliminated surface expression of HLA-B protein relative to an unmodified cell, comprising a genetic modification in the HLA-B gene, wherein the genetic modification comprises at least one nucleotide within the genomic coordinates chosen from: chr6:31356777-31356801; chr6:31355492-31355516; chr6:31355379-31355403; chr6:31355491-31355515; chr6:31355361-31355385; chr6:31355221-31355245; chr6:31355222-31355246; chr6:31355205-31355229; chr6:31355446-31355470; chr6:31356425-31356449; or chr6:31355441-31355465.

[0444] In some embodiments, an engineered human cell is provided which has reduced or eliminated surface expression of HLA-B protein relative to an unmodified cell, comprising a genetic modification in the HLA-B gene, wherein the genetic modification comprises at least one nucleotide within the genomic coordinates chosen from: chr6:31355221-31355245; chr6:31355222-31355246; chr6:31355205-31355229; chr6:31355446-31355470; chr6:31356425-31356449; or chr6:31355441-31355465.

[0445] In some embodiments, an engineered human cell is provided which has reduced or eliminated surface expression of HLA-B protein relative to an unmodified cell, comprising a genetic modification in the HLA-B gene, wherein the genetic modification comprises at least one nucleotide within the genomic coordinates chosen from: chr6:31356777-31356801; chr6:31355492-31355516; chr6:31355379-31355403; chr6:31355491-31355515; chr6:31355361-31355385; chr6:31355356-31355380; chr6:31355460-31355484; chr6:31357078-31357102; chr6:31355417-31355441; chr6:31355366-31355390; chr6:31355415-31355439; chr6:31355378-31355402; chr6:31355166-31355190; chr6:31355401-31355425; chr6:31355469-31355493; chr6:31356262-31356286; chr6:31355419-31355443; chr6:31355390-31355414; chr6:31355369-31355393; chr6:31355221-31355245; chr6:31355222-31355246; chr6:31355205-31355229; chr6:31355446-31355470; chr6:31356425-31356449; chr6:31355441-31355465; chr6:31355203-31355227; chr6:31356437-31356461; chr6:31356426-31356450; chr6:31356763-31356787; chr6:31356764-31356788; chr6:31356762-31356786; chr6:31355204-31355228; chr6:31356436-31356460; or chr6:31356767-31356791.

[0446] In some embodiments, an engineered human cell is provided which has reduced or eliminated surface expression of HLA-B protein relative to an unmodified cell, comprising a genetic modification in the HLA-B gene, wherein the genetic modification comprises at least one nucleotide within the genomic coordinates chosen from: (a) chr6:31355348-31355368; or (b) chr6:31355390-31355414; chr6:31355417-31355441; or chr6: 31356386-31356410.

[0447] In some embodiments, an engineered human cell is provided which has reduced or eliminated surface expression of HLA-B protein relative to an unmodified cell, comprising a genetic modification in an HLA-B gene, wherein the genetic modification comprises an indel, a C to T substitution, or an A to G substitution within the genomic coordinates chosen from: (a) chr6:31355145-31356401 or (b) chr6:31357084-31354647. In some embodiments, the cell is homozygous for HLA-A and homozygous for HLA-C.

[0448] In some embodiments, an engineered human cell is provided which has reduced or eliminated surface expression of HLA-A and HLA-B protein relative to an unmodified cell, comprising a genetic modification in an HLA-A and HLA-B gene, wherein the genetic modification in HLA-A comprises an indel, a C to T substitution, or an A to G substitution within the genomic coordinates chosen from chr6:29942854-chr6:29942913 and chr6:29943518-chr6:29943619; and wherein the genetic modification in HLA-B comprises an indel, a C to T substitution, or an A to G substitution within the genomic coordinates chosen from: (a) chr6:31355145-31356401 or (b) chr6:31357084-31354647. In some embodiments, the cell is homozygous for HLA-C.

[0449] In some embodiments, an engineered human cell is provided which has reduced or eliminated surface expression of HLA-B protein relative to an unmodified cell, comprising a genetic modification in an HLA-B gene, wherein the genetic modification comprises an indel, a C to T substitution, or an A to G substitution within the genomic coordinates chosen from; chr6:31355182-31355202; chr6:31355348-31355368; chr6:31355145-31355165; chr6:31355349-31355369; chr6:31356381-31356401; chr6:31356380-31356400; chr6:31355204-31355224; chr6:31355205-31355225; chr6:31355191-31355211; chr6:31355192-31355212; chr6:31355193-31355213; chr6:31355198-31355218; chr6:31355320-31355340; chr6:31355319-31355339; chr6:31355347-31355367; chr6:31355432-31355452; chr6:31355340-31355360; chr6:31355410-31355430; chr6:31355414-31355434; or chr6:31355409-31355429. In some embodiments, the cell is homozygous for HLA-A and HLA-C.

[0450] In some embodiments, an engineered human cell is provided which has reduced or eliminated surface expression of HLA-B protein relative to an unmodified cell, comprising a genetic modification in an HLA-B gene, wherein the genetic modification comprises an indel, a C to T substitution, or an A to G substitution within the genomic coordinates chosen from; chr6:31355182-31355202; chr6:31355349-31355369; chr6:31355348-31355368; or chr6:31355145-31355165. In some embodiments, the cell is homozygous for HLA-A and HLA-C.

[0451] In some embodiments, an engineered human cell is provided which has reduced or eliminated surface expression of HLA-B protein relative to an unmodified cell, comprising a genetic modification in an HLA-B gene, wherein the genetic modification comprises an indel, a C to T substitution, or an A to G substitution within the genomic coordinates chosen from; chr6:31355348-31355368; chr6:31355349-31355369; chr6:31356381-31356401; chr6:31356380-31356400; chr6:31355204-31355224; chr6:31355205-31355225; chr6:31355191-31355211; chr6:31355192-31355212; chr6:31355193-31355213; chr6:31355198-31355218; chr6:31355320-31355340; chr6:31355319-31355339; chr6:31355182-31355202; chr6:31355178-31355198; chr6:31355347-31355367; chr6:31355145-31355165; chr6:31355432-31355452; chr6:31355340-31355360; or chr6:31355414-31355434. In some embodiments, the cell is homozygous for HLA-A and HLA-C.

[0452] In some embodiments, an engineered human cell is provided which has reduced or eliminated surface expression of HLA-B protein relative to an unmodified cell, comprising a genetic modification in an HLA-B gene, wherein the genetic modification comprises an indel, a C to T substitution, or an A to G substitution within the genomic coordinates chosen from; chr6:31355348-31355368; chr6:31355349-31355369; chr6:31356381-31356401; chr6:31356380-31356400; chr6:31355205-31355225; chr6:31355191-31355211; chr6:31355192-31355212; chr6:31355193-31355213; chr6:31355198-31355218; chr6:31355320-31355340; chr6:31355319-31355339; chr6:31355182-31355202; chr6:31355178-31355198; chr6:31355347-31355367; chr6:31355145-31355165; chr6:31355432-31355452; chr6:31355340-31355360; chr6:31355410-31355430; chr6:31355414-31355434; or chr6:31355409-31355429. In some embodiments, the cell is homozygous for HLA-A and HLA-C.

[0453] In some embodiments, an engineered human cell is provided which has reduced or eliminated surface expression of HLA-B protein relative to an unmodified cell, comprising a genetic modification in an HLA-B gene, wherein the genetic modification comprises an indel, a C to T substitution, or an A to G substitution within the genomic coordinates chosen from; chr6:31355348-31355368, chr6:31355349-31355369, chr6:31355192-31355212, chr6:31355347-31355367, chr6:31355340-31355360, chr6:31355409-31355429. In some embodiments, the cell is homozygous for HLA-A and HLA-C.

[0454] In some embodiments, an engineered human cell is provided which has reduced or eliminated surface expression of HLA-B protein relative to an unmodified cell, comprising a genetic modification in an HLA-B gene, wherein the genetic modification comprises an indel, a C to T substitution, or an A to G substitution within the genomic coordinates chosen from; chr6:31355349-31355369 or chr6:31355348-31355368. In some embodiments, the cell is homozygous for HLA-A and HLA-C.

[0455] In some embodiments, an engineered human cell is provided which has reduced or eliminated surface expression of HLA-B protein relative to an unmodified cell, comprising a genetic modification in an HLA-B gene, wherein the genetic modification comprises an indel, a C to T substitution, or an A to G substitution within the genomic coordinates chosen from: chr6:31355192-31355212 or chr6:31355347-31355367. In some embodiments, the cell is homozygous for HLA-A and HLA-C.

[0456] In some embodiments, an engineered human cell is provided which has reduced or eliminated surface expression of HLA-B protein relative to an unmodified cell, comprising a genetic modification in an HLA-B gene, wherein the genetic modification comprises an indel, a C to T substitution, or an A to G substitution within the genomic coordinates chosen from; chr6:31355347-31355367; chr6:31355340-31355360; or chr6:31355409-31355429. In some embodiments, the cell is homozygous for HLA-A and HLA-C.

[0457] In some embodiments, an engineered human cell is provided which has reduced or eliminated surface expression of HLA-B protein relative to an unmodified cell, comprising a genetic modification in an HLA-B gene, wherein the genetic modification comprises an indel, a C to T substitution, or an A to G substitution within the genomic coordinates chosen from; chr6:31355348-31355368; chr6:31355145-31355165; chr6:31355347-31355367; chr6:31355432-31355452; or chr6:31355340-31355360. In some embodiments, the cell is homozygous for HLA-A and HLA-C.

[0458] In some embodiments, an engineered human cell is provided which has reduced or eliminated surface expression of HLA-B protein relative to an unmodified cell, comprising a genetic modification in an HLA-B gene, wherein the genetic modification comprises an indel, a C to T substitution, or an A to G substitution within the genomic coordinates chosen from; chr6:31356777-31356801; chr6:31355492-31355516; chr6:31355379-31355403; chr6:31355491-31355515; chr6:31355361-31355385; chr6:31355356-31355380; chr6:31355460-31355484; chr6:31357078-31357102; chr6:31355417-31355441; chr6:31355366-31355390; chr6:31355415-31355439; chr6:31355378-31355402; chr6:31355166-31355190; chr6:31355401-31355425; chr6:31355469-31355493; chr6:31355221-31355245; chr6:31355222-31355246; chr6:31355205-31355229; chr6:31355446-31355470; chr6:31356425-31356449; chr6:31355441-31355465; chr6:31355203-31355227; chr6:31356437-31356461; chr6:31356426-31356450; chr6:31356763-31356787; or chr6:31356764-31356788. In some embodiments, the cell is homozygous for HLA-A and HLA-C.

[0459] In some embodiments, an engineered human cell is provided which has reduced or eliminated surface expression of HLA-B protein relative to an unmodified cell, comprising a genetic modification in an HLA-B gene, wherein the genetic modification comprises an indel, a C to T substitution, or an A to G substitution within the genomic coordinates chosen from: chr6:31356777-31356801; chr6:31355492-31355516; chr6:31355361-31355385; chr6:31355379-31355403; chr6:31355491-31355515; chr6:31355356-31355380; chr6:31355366-31355390; chr6:31355417-31355441; chr6:31357078-31357102; chr6:31355460-31355484; chr6:31355415-31355439; chr6:31355166-31355190; chr6:31355378-31355402; chr6:31355401-31355425; chr6:31356262-31356286; chr6:31355221-31355245; chr6:31355222-31355246; chr6:31355205-31355229; chr6:31355446-31355470; chr6:31356425-31356449; chr6:31355441-31355465; chr6:31355203-31355227; chr6:31356437-31356461; chr6:31356426-31356450; chr6:31356763-31356787; or chr6:31356764-31356788. In some embodiments, the cell is homozygous for HLA-A and HLA-C.

[0460] In some embodiments, an engineered human cell is provided which has reduced or eliminated surface expression of HLA-B protein relative to an unmodified cell, comprising a genetic modification in an HLA-B gene, wherein the genetic modification comprises an indel, a C to T substitution, or an A to G substitution within the genomic coordinates chosen from; chr6:31356777-31356801; chr6:31355492-31355516; chr6:31355379-31355403; chr6:31355491-31355515; chr6:31355361-31355385; chr6:31355356-31355380; chr6:31355460-31355484; chr6:31357078-31357102; chr6:31355417-31355441; chr6:31355366-31355390; chr6:31355221-31355245; chr6:31355222-31355246; chr6:31355205-31355229; chr6:31355446-31355470; chr6:31356425-31356449; chr6:31355441-31355465; chr6:31355203-31355227; chr6:31356437-31356461; or chr6:31356426-31356450. In some embodiments, the cell is homozygous for HLA-A and HLA-C.

[0461] In some embodiments, an engineered human cell is provided which has reduced or eliminated surface expression of HLA-B protein relative to an unmodified cell, comprising a genetic modification in an HLA-B gene, wherein the genetic modification comprises an indel, a C to T substitution, or an A to G substitution within the genomic coordinates chosen from; chr6:31356777-31356801; chr6:31355492-31355516; chr6:31355379-31355403; chr6:31355491-31355515; chr6:31355361-31355385; chr6:31355221-31355245; chr6:31355222-31355246; chr6:31355205-31355229; chr6:31355446-31355470; chr6:31356425-31356449; or chr6:31355441-31355465. In some embodiments, the cell is homozygous for HLA-A and HLA-C.

[0462] In some embodiments, an engineered human cell is provided which has reduced or eliminated surface expression of HLA-B protein relative to an unmodified cell, comprising a genetic modification in an HLA-B gene, wherein the genetic modification comprises an indel, a C to T substitution, or an A to G substitution within the genomic coordinates chosen from; chr6:31355221-31355245; chr6:31355222-31355246; chr6:31355205-31355229; chr6:31355446-31355470; chr6:31356425-31356449; or chr6:31355441-31355465. In some embodiments, the cell is homozygous for HLA-A and HLA-C.

[0463] In some embodiments, an engineered human cell is provided which has reduced or eliminated surface expression of HLA-B protein relative to an unmodified cell, comprising a genetic modification in an HLA-B gene, wherein the genetic modification comprises an indel, a C to T substitution, or an A to G substitution within the genomic coordinates chosen from: (a) chr6:31355348-31355368; or (b) chr6:31355390-31355414; chr6:31355417-31355441; or chr6: 31356386-31356410. In some embodiments, the cell is homozygous for HLA-A and HLA-C.

[0464] In some embodiments, an engineered human cell is provided which has reduced or eliminated surface expression of HLA-B protein relative to an unmodified cell, comprising a genetic modification in an HLA-B gene, wherein the genetic modification comprises an indel, a C to T substitution, or an A to G substitution within the genomic coordinates chosen from: (a) chr6:31355182-31355202; chr6:31355348-31355368; chr6:31355180-31355200; chr6:31355145-31355165; chr6:31355349-31355369; chr6:31355157-31355177; chr6:31356381-31356401; chr6:31356380-31356400; chr6:31355204-31355224; chr6:31355205-31355225; chr6:31355185-31355205; chr6:31355191-31355211; chr6:31355192-31355212; chr6:31355190-31355210; chr6:31355193-31355213; chr6:31355198-31355218; chr6:31355320-31355340; chr6:31355319-31355339; chr6:31355178-31355198; chr6:31355347-31355367; chr6:31355432-31355452; chr6:31355340-31355360; chr6:31355576-31355596; chr6:31355410-31355430; chr6:31355419-31355439; chr6:31355414-31355434; chr6:31355409-31355429; or (b) chr6:31356777-31356801; chr6:31355492-31355516; chr6: 31355379-31355403; chr6:31355491-31355515; chr6:31355361-31355385; chr6:31355356-31355380; chr6:31355460-31355484; chr6:31357078-31357102; chr6:31355417-31355441; chr6:31355366-31355390; chr6:31355415-31355439; chr6:31355378-31355402; chr6:31355166-31355190; chr6:31355401-31355425; ch6:31355469-31355493; chr6:31356262-31356286; chr6:31355419-31355443; chr6:31355390-31355414; chr6:31355369-31355393; chr6:31355221-31355245; chr6:31355222-31355246; chr6:31355205-31355229; chr6:31355446-31355470; chr6:31356425-31356449; chr6:31355441-31355465; chr6:31355203-31355227; chr6:31356437-31356461; chr6:31356426-31356450; chr6:31356763-31356787; chr6:31356764-31356788; chr6:31356762-31356786; chr6:31355204-31355228; chr6:31356436-31356460; or chr6:31356767-31356791, wherein the genetic modification comprises at least 2, at least 3, at least 4, at least 5, at least 6, at least 7, at least 8, at least 9, or at least 10 contiguous nucleotides within the genomic coordinates. In some embodiments, the cell is homozygous for HLA-A. In some embodiments, the cell is homozygous for HLA-C. In some embodiments, the cell is homozygous for HLA-A and homozygous for HLA-C.

[0465] In some embodiments, an engineered human cell is provided which has reduced or eliminated surface expression of HLA-B protein relative to an unmodified cell, comprising a genetic modification in an HLA-B gene, wherein the genetic modification comprises an indel, a C to T substitution, or an A to G substitution within the genomic coordinates chosen from: (a) chr6:31355182-31355202; chr6:31355348-31355368; chr6:31355180-31355200; chr6:31355145-31355165; chr6:31355349-31355369; chr6:31355157-31355177; chr6:31356381-31356401; chr6:31356380-31356400; chr6:31355204-31355224; chr6:31355205-31355225; chr6:31355185-31355205; chr6:31355191-31355211; chr6:31355192-31355212; chr6:31355190-31355210; chr6:31355193-31355213; chr6:31355198-31355218; chr6:31355320-31355340; chr6:31355319-31355339; chr6:31355178-31355198; chr6:31355347-31355367; chr6:31355432-31355452; chr6:31355340-31355360; chr6:31355576-31355596; chr6:31355410-31355430; chr6:31355419-31355439; chr6:31355414-31355434; chr6:31355409-31355429; or (b) chr6:31356777-31356801; chr6:31355492-31355516; chr6: 31355379-31355403; chr6:31355491-31355515; chr6:31355361-31355385; chr6:31355356-31355380; chr6:31355460-31355484; chr6:31357078-31357102; chr6:31355417-31355441; chr6:31355366-31355390; chr6:31355415-31355439; chr6:31355378-31355402; chr6:31355166-31355190; chr6:31355401-31355425; ch6:31355469-31355493; chr6:31356262-31356286; chr6:31355419-31355443; chr6:31355390-31355414; chr6:31355369-31355393; chr6:31355221-31355245; chr6:31355222-31355246; chr6:31355205-31355229; chr6:31355446-31355470; chr6:31356425-31356449; chr6:31355441-31355465; chr6:31355203-31355227; chr6:31356437-31356461; chr6:31356426-31356450; chr6:31356763-31356787; chr6:31356764-31356788; chr6:31356762-31356786; chr6:31355204-31355228; chr6:31356436-31356460; or chr6:31356767-31356791; wherein the genetic modification comprises at least 5 contiguous nucleotides within the genomic coordinates. In some embodiments, the cell is homozygous for HLA-A. In some embodiments, the cell is homozygous for HLA-C. In some embodiments, the cell is homozygous for HLA-A and homozygous for HLA-C.

[0466] In some embodiments, an engineered human cell is provided which has reduced or eliminated surface expression of HLA-B protein relative to an unmodified cell, comprising a genetic modification in an HLA-B gene, wherein the genetic modification comprises an indel, a C to T substitution, or an A to G substitution within the genomic coordinates chosen from: (a) chr6:31355182-31355202; chr6:31355348-31355368; chr6:31355180-31355200; chr6:31355145-31355165; chr6:31355349-31355369; chr6:31355157-31355177; chr6:31356381-31356401; chr6:31356380-31356400; chr6:31355204-31355224; chr6:31355205-31355225; chr6:31355185-31355205; chr6:31355191-31355211; chr6:31355192-31355212; chr6:31355190-31355210; chr6:31355193-31355213; chr6:31355198-31355218; chr6:31355320-31355340; chr6:31355319-31355339; chr6:31355178-31355198; chr6:31355347-31355367; chr6:31355432-31355452; chr6:31355340-31355360; chr6:31355576-31355596; chr6:31355410-31355430; chr6:31355419-31355439; chr6:31355414-31355434; chr6:31355409-31355429; or (b) chr6:31356777-31356801; chr6:31355492-31355516; chr6: 31355379-31355403; chr6:31355491-31355515; chr6:31355361-31355385; chr6:31355356-31355380; chr6:31355460-31355484; chr6:31357078-31357102; chr6:31355417-31355441; chr6:31355366-31355390; chr6:31355415-31355439; chr6:31355378-31355402; chr6:31355166-31355190; chr6:31355401-31355425; ch6:31355469-31355493; chr6:31356262-31356286; chr6:31355419-31355443; chr6:31355390-31355414; chr6:31355369-31355393; chr6:31355221-31355245; chr6:31355222-31355246; chr6:31355205-31355229; chr6:31355446-31355470; chr6:31356425-31356449; chr6:31355441-31355465; chr6:31355203-31355227; chr6:31356437-31356461; chr6:31356426-31356450; chr6:31356763-31356787; chr6:31356764-31356788; chr6:31356762-31356786; chr6:31355204-31355228; chr6:31356436-31356460; or chr6:31356767-31356791, wherein the genetic modification comprises at least 6, 7, 8, 9, or 10 contiguous nucleotides within the genomic coordinates. In some embodiments, the genetic modification comprises at least 6 contiguous nucleotides within the genomic coordinates. In some embodiments, the genetic modification comprises at least 7 contiguous nucleotides within the genomic coordinates. In some embodiments, the genetic modification comprises at least 8 contiguous nucleotides within the genomic coordinates. In some embodiments, the genetic modification comprises at least 9 contiguous nucleotides within the genomic coordinates. In some embodiments, the genetic modification comprises at least 10 contiguous nucleotides within the genomic coordinates. In some embodiments, the cell is homozygous for HLA-A. In some embodiments, the cell is homozygous for HLA-C. In some embodiments, the cell is homozygous for HLA-A and homozygous for HLA-C.

[0467] In some embodiments, an engineered human cell is provided which has reduced or eliminated surface expression of HLA-B protein relative to an unmodified cell, comprising a genetic modification in an HLA-B gene, wherein the genetic modification comprises an indel, a C to T substitution, or an A to G substitution within the genomic coordinates chosen from: (a) chr6:31355182-31355202; chr6:31355348-31355368; chr6:31355180-31355200; chr6:31355145-31355165; chr6:31355349-31355369; chr6:31355157-31355177; chr6:31356381-31356401; chr6:31356380-31356400; chr6:31355204-31355224; chr6:31355205-31355225; chr6:31355185-31355205; chr6:31355191-31355211; chr6:31355192-31355212; chr6:31355190-31355210; chr6:31355193-31355213; chr6:31355198-31355218; chr6:31355320-31355340; chr6:31355319-31355339; chr6:31355178-31355198; chr6:31355347-31355367; chr6:31355432-31355452; chr6:31355340-31355360; chr6:31355576-31355596; chr6:31355410-31355430; chr6:31355419-31355439; chr6:31355414-31355434; chr6:31355409-31355429; or (b) chr6:31356777-31356801; chr6:31355492-31355516; chr6: 31355379-31355403; chr6:31355491-31355515; chr6:31355361-31355385; chr6:31355356-31355380; chr6:31355460-31355484; chr6:31357078-31357102; chr6:31355417-31355441; chr6:31355366-31355390; chr6:31355415-31355439; chr6:31355378-31355402; chr6:31355166-31355190; chr6:31355401-31355425; ch6:31355469-31355493; chr6:31356262-31356286; chr6:31355419-31355443; chr6:31355390-31355414; chr6:31355369-31355393; chr6:31355221-31355245; chr6:31355222-31355246; chr6:31355205-31355229; chr6:31355446-31355470; chr6:31356425-31356449; chr6:31355441-31355465; chr6:31355203-31355227; chr6:31356437-31356461; chr6:31356426-31356450; chr6:31356763-31356787; chr6:31356764-31356788; chr6:31356762-31356786; chr6:31355204-31355228; chr6:31356436-31356460; or chr6:31356767-31356791; wherein the genetic modification comprises at least one C to T substitution or at least one A to G substitution within the genomic coordinates. In some embodiments, the cell is homozygous for HLA-A. In some embodiments, the cell is homozygous for HLA-C. In some embodiments, the cell is homozygous for HLA-A and homozygous for HLA-C.

[0468] In some embodiments, an engineered human cell is provided wherein the HLA-B expression is reduced or eliminated by a gene editing system that binds to an HLA-B genomic target sequence comprising at least 5 contiguous nucleotides within the genomic coordinates chosen from: (a) chr6:31355182-31355202; chr6:31355348-31355368; chr6:31355180-31355200; chr6:31355145-31355165; chr6:31355349-31355369; chr6:31355157-31355177; chr6:31356381-31356401; chr6:31356380-31356400; chr6:31355204-31355224; chr6:31355205-31355225; chr6:31355185-31355205; chr6:31355191-31355211; chr6:31355192-31355212; chr6:31355190-31355210; chr6:31355193-31355213; chr6:31355198-31355218; chr6:31355320-31355340; chr6:31355319-31355339; chr6:31355178-31355198; chr6:31355347-31355367; chr6:31355432-31355452; chr6:31355340-31355360; chr6:31355576-31355596; chr6:31355410-31355430; chr6:31355419-31355439; chr6:31355414-31355434; and chr6:31355409-31355429; or (b) chr6:31356777-31356801; chr6:31355492-31355516; chr6: 31355379-31355403; chr6:31355491-31355515; chr6:31355361-31355385; chr6:31355356-31355380; chr6:31355460-31355484; chr6:31357078-31357102; chr6:31355417-31355441; chr6:31355366-31355390; chr6:31355415-31355439; chr6:31355378-31355402; chr6:31355166-31355190; chr6:31355401-31355425; ch6:31355469-31355493; chr6:31356262-31356286; chr6:31355419-31355443; chr6:31355390-31355414; chr6:31355369-31355393; chr6:31355221-31355245; chr6:31355222-31355246; chr6:31355205-31355229; chr6:31355446-31355470; chr6:31356425-31356449; chr6:31355441-31355465; chr6:31355203-31355227; chr6:31356437-31356461; chr6:31356426-31356450; chr6:31356763-31356787; chr6:31356764-31356788; chr6:31356762-31356786; chr6:31355204-31355228; chr6:31356436-31356460; or chr6:31356767-31356791. In some embodiments, the HLA-B genomic target sequence comprises at least 10 contiguous nucleotides within the genomic coordinates. In some embodiments, the HLA-B genomic target sequence comprises at least 15 contiguous nucleotides within the genomic coordinates.

[0469] In some embodiments, an engineered human cell is provided wherein the HLA-B expression is reduced or eliminated by a gene editing system that binds to an HLA-B genomic target sequence comprising at least 5 contiguous nucleotides within the genomic coordinates chosen from: (a) chr6:31355182-31355202; chr6:31355348-31355368; chr6:31355180-31355200; chr6:31355145-31355165; chr6:31355349-31355369; chr6:31355157-31355177; chr6:31356381-31356401; chr6:31356380-31356400; chr6:31355204-31355224; chr6:31355205-31355225; chr6:31355185-31355205; chr6:31355191-31355211; chr6:31355192-31355212; chr6:31355190-31355210; chr6:31355193-31355213; chr6:31355198-31355218; chr6:31355320-31355340; chr6:31355319-31355339; chr6:31355178-31355198; chr6:31355347-31355367; chr6:31355432-31355452; chr6:31355340-31355360; chr6:31355576-31355596; chr6:31355410-31355430; chr6:31355419-31355439; chr6:31355414-31355434; chr6:31355409-31355429; or (b) chr6:31356777-31356801; chr6:31355492-31355516; chr6: 31355379-31355403; chr6:31355491-31355515; chr6:31355361-31355385; chr6:31355356-31355380; chr6:31355460-31355484; chr6:31357078-31357102; chr6:31355417-31355441; chr6:31355366-31355390; chr6:31355415-31355439; chr6:31355378-31355402; chr6:31355166-31355190; chr6:31355401-31355425; ch6:31355469-31355493; chr6:31356262-31356286; chr6:31355419-31355443; chr6:31355390-31355414; chr6:31355369-31355393; chr6:31355221-31355245; chr6:31355222-31355246; chr6:31355205-31355229; chr6:31355446-31355470; chr6:31356425-31356449; chr6:31355441-31355465; chr6:31355203-31355227; chr6:31356437-31356461; chr6:31356426-31356450; chr6:31356763-31356787; chr6:31356764-31356788; chr6:31356762-31356786; chr6:31355204-31355228; chr6:31356436-31356460; or chr6:31356767-31356791. In some embodiments, the HLA-B genomic target sequence comprises at least 10 contiguous nucleotides within the genomic coordinates. In some embodiments, the HLA-B genomic target sequence comprises at least 15 contiguous nucleotides within the genomic coordinates.

[0470] In some embodiments, an engineered human cell is provided wherein the HLA-B expression is reduced or eliminated by a gene editing system that binds to an HLA-B genomic target sequence comprising at least 5 contiguous nucleotides within the genomic coordinates chosen from: (a) chr6:31355182-31355202; chr6:31355348-31355368; chr6:31355180-31355200; chr6:31355145-31355165; chr6:31355349-31355369; chr6:31355157-31355177; chr6:31356381-31356401; chr6:31356380-31356400; chr6:31355204-31355224; chr6:31355205-31355225; chr6:31355185-31355205; chr6:31355191-31355211; chr6:31355192-31355212; chr6:31355190-31355210; chr6:31355193-31355213; chr6:31355198-31355218; chr6:31355320-31355340; chr6:31355319-31355339; chr6:31355178-31355198; chr6:31355347-31355367; chr6:31355432-31355452; chr6:31355340-31355360; chr6:31355576-31355596; chr6:31355410-31355430; chr6:31355419-31355439; chr6:31355414-31355434; chr6:31355409-31355429; or (b) chr6:31356777-31356801; chr6:31355492-31355516; chr6: 31355379-31355403; chr6:31355491-31355515; chr6:31355361-31355385; chr6:31355356-31355380; chr6:31355460-31355484; chr6:31357078-31357102; chr6:31355417-31355441; chr6:31355366-31355390; chr6:31355415-31355439; chr6:31355378-31355402; chr6:31355166-31355190; chr6:31355401-31355425; ch6:31355469-31355493; chr6:31356262-31356286; chr6:31355419-31355443; chr6:31355390-31355414; chr6:31355369-31355393; chr6:31355221-31355245; chr6:31355222-31355246; chr6:31355205-31355229; chr6:31355446-31355470; chr6:31356425-31356449; chr6:31355441-31355465; chr6:31355203-31355227; chr6:31356437-31356461; chr6:31356426-31356450; chr6:31356763-31356787; chr6:31356764-31356788; chr6:31356762-31356786; chr6:31355204-31355228; chr6:31356436-31356460; or chr6:31356767-31356791. In some embodiments, the HLA-B genomic target sequence comprises at least 10 contiguous nucleotides within the genomic coordinates. In some embodiments, the HLA-B genomic target sequence comprises at least 15 contiguous nucleotides within the genomic coordinates.

[0471] In some embodiments, an engineered human cell is provided wherein the HLA-B expression is reduced or eliminated by a gene editing system that binds to an HLA-B genomic target sequence comprising at least 5 contiguous nucleotides within the genomic coordinates chosen from: chr6:31355182-31355202; chr6:31355348-31355368; chr6:31355180-31355200; chr6:31355145-31355165; chr6:31355349-31355369; chr6:31355157-31355177; chr6:31356381-31356401; chr6:31356380-31356400; chr6:31355204-31355224; chr6:31355205-31355225; chr6:31355185-31355205; chr6:31355191-31355211; chr6:31355192-31355212; chr6:31355190-31355210; chr6:31355193-31355213; chr6:31355198-31355218; chr6:31355320-31355340; chr6:31355319-31355339; chr6:31355178-31355198; chr6:31355347-31355367; chr6:31355432-31355452; chr6:31355340-31355360; chr6:31355576-31355596; chr6:31355410-31355430; chr6:31355419-31355439; chr6:31355414-31355434; chr6:31355409-31355429; or (b) chr6:31356777-31356801; chr6:31355492-31355516; chr6: 31355379-31355403; chr6:31355491-31355515; chr6:31355361-31355385; chr6:31355356-31355380; chr6:31355460-31355484; chr6:31357078-31357102; chr6:31355417-31355441; chr6:31355366-31355390; chr6:31355415-31355439; chr6:31355378-31355402; chr6:31355166-31355190; chr6:31355401-31355425; ch6:31355469-31355493; chr6:31356262-31356286; chr6:31355419-31355443; chr6:31355390-31355414; chr6:31355369-31355393; chr6:31355221-31355245; chr6:31355222-31355246; chr6:31355205-31355229; chr6:31355446-31355470; chr6:31356425-31356449; chr6:31355441-31355465; chr6:31355203-31355227; chr6:31356437-31356461; chr6:31356426-31356450; chr6:31356763-31356787; chr6:31356764-31356788; chr6:31356762-31356786; chr6:31355204-31355228; chr6:31356436-31356460; or chr6:31356767-31356791.

[0472] In some embodiments, an engineered human cell is provided wherein the HLA-B expression is reduced or eliminated by a gene editing system that binds to an HLA-B genomic target sequence comprising at least 5 contiguous nucleotides within the genomic coordinates chosen from: chr6:31355182-31355202; chr6:31355348-31355368; chr6:31355180-31355200; chr6:31355145-31355165; chr6:31355349-31355369; chr6:31355157-31355177; chr6:31356381-31356401; chr6:31356380-31356400; chr6:31355204-31355224; chr6:31355205-31355225; chr6:31355185-31355205; chr6:31355191-31355211; chr6:31355192-31355212; chr6:31355190-31355210; chr6:31355193-31355213; chr6:31355198-31355218; chr6:31355320-31355340; chr6:31355319-31355339; chr6:31355178-31355198; chr6:31355347-31355367; chr6:31355432-31355452; chr6:31355340-31355360; chr6:31355576-31355596; chr6:31355410-31355430; chr6:31355419-31355439; chr6:31355414-31355434; chr6:31355409-31355429; or (b) chr6:31356777-31356801; chr6:31355492-31355516; chr6: 31355379-31355403; chr6:31355491-31355515; chr6:31355361-31355385; chr6:31355356-31355380; chr6:31355460-31355484; chr6:31357078-31357102; chr6:31355417-31355441; chr6:31355366-31355390; chr6:31355415-31355439; chr6:31355378-31355402; chr6:31355166-31355190; chr6:31355401-31355425; ch6:31355469-31355493; chr6:31356262-31356286; chr6:31355419-31355443; chr6:31355390-31355414; chr6:31355369-31355393; chr6:31355221-31355245; chr6:31355222-31355246; chr6:31355205-31355229; chr6:31355446-31355470; chr6:31356425-31356449; chr6:31355441-31355465; chr6:31355203-31355227; chr6:31356437-31356461; chr6:31356426-31356450; chr6:31356763-31356787; chr6:31356764-31356788; chr6:31356762-31356786; chr6:31355204-31355228; chr6:31356436-31356460; or chr6:31356767-31356791. Due to allelic polymorphism, in some embodiments, the target sequences may comprise 1, 2, or 3 mismatches from the genomic sequence of hg38. In some embodiments, the HLA-B genomic target sequence comprises at least 10 contiguous nucleotides within the genomic coordinates. In some embodiments, the HLA-B genomic target sequence comprises at least 15 contiguous nucleotides within the genomic coordinates.

[0473] In some embodiments, an engineered human cell is provided wherein the HLA-B expression is reduced or eliminated by a gene editing system that binds to an HLA-B genomic target sequence comprising at least 5 contiguous nucleotides within the genomic coordinates chosen from: chr6:31355182-31355202; chr6:31355348-31355368; chr6:31355180-31355200; chr6:31355145-31355165; chr6:31355349-31355369; chr6:31355157-31355177; chr6:31356381-31356401; chr6:31356380-31356400; chr6:31355204-31355224; chr6:31355205-31355225; chr6:31355185-31355205; chr6:31355191-31355211; chr6:31355192-31355212; chr6:31355190-31355210; chr6:31355193-31355213; chr6:31355198-31355218; chr6:31355320-31355340; chr6:31355319-31355339; chr6:31355178-31355198; chr6:31355347-31355367; chr6:31355432-31355452; chr6:31355340-31355360; chr6:31355576-31355596; chr6:31355410-31355430; chr6:31355419-31355439; chr6:31355414-31355434; chr6:31355409-31355429; or (b) chr6:31356777-31356801; chr6:31355492-31355516; chr6: 31355379-31355403; chr6:31355491-31355515; chr6:31355361-31355385; chr6:31355356-31355380; chr6:31355460-31355484; chr6:31357078-31357102; chr6:31355417-31355441; chr6:31355366-31355390; chr6:31355415-31355439; chr6:31355378-31355402; chr6:31355166-31355190; chr6:31355401-31355425; ch6:31355469-31355493; chr6:31356262-31356286; chr6:31355419-31355443; chr6:31355390-31355414; chr6:31355369-31355393; chr6:31355221-31355245; chr6:31355222-31355246; chr6:31355205-31355229; chr6:31355446-31355470; chr6:31356425-31356449; chr6:31355441-31355465; chr6:31355203-31355227; chr6:31356437-31356461; chr6:31356426-31356450; chr6:31356763-31356787; chr6:31356764-31356788; chr6:31356762-31356786; chr6:31355204-31355228; chr6:31356436-31356460; or chr6:31356767-31356791. In some embodiments, the HLA-B genomic target sequence comprises at least 10 contiguous nucleotides within the genomic coordinates. In some embodiments, the HLA-B genomic target sequence comprises at least 15 contiguous nucleotides within the genomic coordinates. In some embodiments, the gene editing system comprises an RNA-guided DNA binding agent, such as an S. pyogenes Cas9, an N. meningitidis Cas9, or a base editor that comprises an S. pyogenes or N. meningitidis Cas9 nickase.

[0474] In some embodiments, an engineered human cell is provided wherein the HLA-B expression is reduced or eliminated by a gene editing system that binds to an HLA-B genomic target sequence comprising at least 5 contiguous nucleotides within the genomic coordinates chosen from: chr6:31355182-31355202; chr6:31355348-31355368; chr6:31355180-31355200; chr6:31355145-31355165; chr6:31355349-31355369; chr6:31355157-31355177; chr6:31356381-31356401; chr6:31356380-31356400; chr6:31355204-31355224; chr6:31355205-31355225; chr6:31355185-31355205; chr6:31355191-31355211; chr6:31355192-31355212; chr6:31355190-31355210; chr6:31355193-31355213; chr6:31355198-31355218; chr6:31355320-31355340; chr6:31355319-31355339; chr6:31355178-31355198; chr6:31355347-31355367; chr6:31355432-31355452; chr6:31355340-31355360; chr6:31355576-31355596; chr6:31355410-31355430; chr6:31355419-31355439; chr6:31355414-31355434; chr6:31355409-31355429. In some embodiments, the HLA-B genomic target sequence comprises at least 10 contiguous nucleotides within the genomic coordinates. In some embodiments, the HLA-B genomic target sequence comprises at least 15 contiguous nucleotides within the genomic coordinates. In some embodiments, the gene editing system comprises an RNA-guided DNA binding agent, such as an S. pyogenes Cas9.

[0475] In some embodiments, an engineered human cell is provided wherein the HLA-B expression is reduced or eliminated by a gene editing system that binds to an HLA-B genomic target sequence comprising at least 5 contiguous nucleotides within the genomic coordinates chosen from: chr6:31356777-31356801; chr6:31355492-31355516; chr6:31355379-31355403; chr6:31355491-31355515; chr6:31355361-31355385; chr6:31355356-31355380; chr6:31355460-31355484; chr6:31357078-31357102; chr6:31355417-31355441; chr6:31355366-31355390; chr6:31355415-31355439; chr6:31355378-31355402; chr6:31355166-31355190; chr6:31355401-31355425; chr6:31355469-31355493; chr6:31356262-31356286; chr6:31355419-31355443; chr6:31355390-31355414; chr6:31355369-31355393; chr6:31355221-31355245; chr6:31355222-31355246; chr6:31355205-31355229; chr6:31355446-31355470; chr6:31356425-31356449; chr6:31355441-31355465; chr6:31355203-31355227; chr6:31356437-31356461; chr6:31356426-31356450; chr6:31356763-31356787; chr6:31356764-31356788; chr6:31356762-31356786; chr6:31355204-31355228; chr6:31356436-31356460; or chr6:31356767-31356791. In some embodiments, the HLA-B genomic target sequence comprises at least 10 contiguous nucleotides within the genomic coordinates. In some embodiments, the HLA-B genomic target sequence comprises at least 15 contiguous nucleotides within the genomic coordinates. In some embodiments, the gene editing system comprises an RNA-guided DNA binding agent, such as an N. meningitidis Cas9 or Nme2Cas9.

[0476] In some embodiments, an engineered human cell is provided wherein the HLA-B expression is reduced or eliminated by a gene editing system that binds to an HLA-B genomic target sequence comprising at least 5 contiguous nucleotides within the genomic coordinates chosen from: chr6:31355182-31355202; chr6:31355348-31355368; chr6:31355180-31355200; chr6:31355145-31355165; chr6:31355349-31355369; chr6:31355157-31355177; chr6:31356381-31356401; chr6:31356380-31356400; chr6:31355204-31355224; chr6:31355205-31355225; chr6:31355185-31355205; chr6:31355191-31355211; chr6:31355192-31355212; chr6:31355190-31355210; chr6:31355193-31355213; chr6:31355198-31355218; chr6:31355320-31355340; chr6:31355319-31355339; chr6:31355178-31355198; chr6:31355347-31355367; chr6:31355432-31355452; chr6:31355340-31355360; chr6:31355576-31355596; chr6:31355410-31355430; chr6:31355419-31355439; chr6:31355414-31355434; chr6:31355409-31355429; In some embodiments, the HLA-B genomic target sequence comprises at least 10 contiguous nucleotides within the genomic coordinates. In some embodiments, the HLA-B genomic target sequence comprises at least 15 contiguous nucleotides within the genomic coordinates. In some embodiments, the gene editing system comprises an RNA-guided DNA binding agent, such as a base editor comprising a deaminase and an S. pyogenes Cas9 nickase.

[0477] In some embodiments, an engineered human cell is provided wherein the HLA-B expression is reduced or eliminated by a gene editing system that binds to an HLA-B genomic target sequence comprising at least 5 contiguous nucleotides within the genomic coordinates chosen from: chr6:31355182-31355202; chr6:31355348-31355368; chr6:31355180-31355200; chr6:31355145-31355165; chr6:31355349-31355369; chr6:31355157-31355177; chr6:31356381-31356401; chr6:31356380-31356400; chr6:31355204-31355224; chr6:31355205-31355225; chr6:31355185-31355205; chr6:31355191-31355211; chr6:31355192-31355212; chr6:31355190-31355210; chr6:31355193-31355213; chr6:31355198-31355218; chr6:31355320-31355340; chr6:31355319-31355339; chr6:31355178-31355198; chr6:31355347-31355367; chr6:31355432-31355452; chr6:31355340-31355360; chr6:31355576-31355596; chr6:31355410-31355430; chr6:31355419-31355439; chr6:31355414-31355434; chr6:31355409-31355429; or (b) chr6:31356777-31356801; chr6:31355492-31355516; chr6: 31355379-31355403; chr6:31355491-31355515; chr6:31355361-31355385; chr6:31355356-31355380; chr6:31355460-31355484; chr6:31357078-31357102; chr6:31355417-31355441; chr6:31355366-31355390; chr6:31355415-31355439; chr6:31355378-31355402; chr6:31355166-31355190; chr6:31355401-31355425; ch6:31355469-31355493; chr6:31356262-31356286; chr6:31355419-31355443; chr6:31355390-31355414; chr6:31355369-31355393; chr6:31355221-31355245; chr6:31355222-31355246; chr6:31355205-31355229; chr6:31355446-31355470; chr6:31356425-31356449; chr6:31355441-31355465; chr6:31355203-31355227; chr6:31356437-31356461; chr6:31356426-31356450; chr6:31356763-31356787; chr6:31356764-31356788; chr6:31356762-31356786; chr6:31355204-31355228; chr6:31356436-31356460; or chr6:31356767-31356791. In some embodiments, the HLA-B genomic target sequence comprises at least 10 contiguous nucleotides within the genomic coordinates. In some embodiments, the HLA-B genomic target sequence comprises at least 15 contiguous nucleotides within the genomic coordinates.

[0478] In some embodiments, an engineered human cell is provided wherein the HLA-B expression is reduced or eliminated by a gene editing system that binds to an HLA-B genomic target sequence comprising at least 5 contiguous nucleotides within the genomic coordinates chosen from: (a) chr6:31355145-31356401 or (b) chr6:31357084-31354647. In some embodiments, the HLA-B genomic target sequence comprises at least 10 contiguous nucleotides within the genomic coordinates. In some embodiments, the HLA-B genomic target sequence comprises at least 15 contiguous nucleotides within the genomic coordinates.

[0479] In some embodiments, an engineered human cell is provided wherein the HLA-B expression is reduced or eliminated by a gene editing system that binds to an HLA-B genomic target sequence comprising at least 5 contiguous nucleotides within the genomic coordinates chr6:31355182-31355202; chr6:31355348-31355368; chr6:31355180-31355200; chr6:31355145-31355165; chr6:31355349-31355369; chr6:31355157-31355177; chr6:31356381-31356401; chr6:31356380-31356400; chr6:31355204-31355224; chr6:31355205-31355225; chr6:31355185-31355205; chr6:31355191-31355211; chr6:31355192-31355212; chr6:31355190-31355210; chr6:31355193-31355213; chr6:31355198-31355218; chr6:31355320-31355340; chr6:31355319-31355339; chr6:31355178-31355198; chr6:31355347-31355367; chr6:31355432-31355452; chr6:31355340-31355360; chr6:31355576-31355596; chr6:31355410-31355430; chr6:31355419-31355439; chr6:31355414-31355434; and chr6:31355409-31355429.

[0480] In some embodiments, an engineered human cell is provided wherein the HLA-B expression is reduced or eliminated by a gene editing system that binds to an HLA-B genomic target sequence comprising at least 5 contiguous nucleotides within the genomic coordinates chr6:31355182-31355202.

[0481] In some embodiments, an engineered human cell is provided wherein the HLA-B expression is reduced or eliminated by a gene editing system that binds to an HLA-B genomic target sequence comprising at least 5 contiguous nucleotides within the genomic coordinates chr6:31355348-31355368.

[0482] In some embodiments, an engineered human cell is provided wherein the HLA-B expression is reduced or eliminated by a gene editing system that binds to an HLA-B genomic target sequence comprising at least 5 contiguous nucleotides within the genomic coordinates chr6:31355180-31355200.

[0483] In some embodiments, an engineered human cell is provided wherein the HLA-B expression is reduced or eliminated by a gene editing system that binds to an HLA-B genomic target sequence comprising at least 5 contiguous nucleotides within the genomic coordinates chr6:31355145-31355165.

[0484] In some embodiments, an engineered human cell is provided wherein the HLA-B expression is reduced or eliminated by a gene editing system that binds to an HLA-B genomic target sequence comprising at least 5 contiguous nucleotides within the genomic coordinates chr6:31355349-31355369.

[0485] In some embodiments, an engineered human cell is provided wherein the HLA-B expression is reduced or eliminated by a gene editing system that binds to an HLA-B genomic target sequence comprising at least 5 contiguous nucleotides within the genomic coordinates chr6:31355157-31355177.

[0486] In some embodiments, an engineered human cell is provided wherein the HLA-B expression is reduced or eliminated by a gene editing system that binds to an HLA-B genomic target sequence comprising at least 5 contiguous nucleotides within the genomic coordinates chr6:31356381-31356401.

[0487] In some embodiments, an engineered human cell is provided wherein the HLA-B expression is reduced or eliminated by a gene editing system that binds to an HLA-B genomic target sequence comprising at least 5 contiguous nucleotides within the genomic coordinates chr6:31356380-31356400.

[0488] In some embodiments, an engineered human cell is provided wherein the HLA-B expression is reduced or eliminated by a gene editing system that binds to an HLA-B genomic target sequence comprising at least 5 contiguous nucleotides within the genomic coordinates chr6:31355204-31355224.

[0489] In some embodiments, an engineered human cell is provided wherein the HLA-B expression is reduced or eliminated by a gene editing system that binds to an HLA-B genomic target sequence comprising at least 5 contiguous nucleotides within the genomic coordinates chr6:31355205-31355225.

[0490] In some embodiments, an engineered human cell is provided wherein the HLA-B expression is reduced or eliminated by a gene editing system that binds to an HLA-B genomic target sequence comprising at least 5 contiguous nucleotides within the genomic coordinates chr6:31355185-31355205.

[0491] In some embodiments, an engineered human cell is provided wherein the HLA-B expression is reduced or eliminated by a gene editing system that binds to an HLA-B genomic target sequence comprising at least 5 contiguous nucleotides within the genomic coordinates chr6:31355191-31355211.

[0492] In some embodiments, an engineered human cell is provided wherein the HLA-B expression is reduced or eliminated by a gene editing system that binds to an HLA-B genomic target sequence comprising at least 5 contiguous nucleotides within the genomic coordinates chr6:31355192-31355212.

[0493] In some embodiments, an engineered human cell is provided wherein the HLA-B expression is reduced or eliminated by a gene editing system that binds to an HLA-B genomic target sequence comprising at least 5 contiguous nucleotides within the genomic coordinates chr6:31355190-31355210.

[0494] In some embodiments, an engineered human cell is provided wherein the HLA-B expression is reduced or eliminated by a gene editing system that binds to an HLA-B genomic target sequence comprising at least 5 contiguous nucleotides within the genomic coordinates chr6:31355193-31355213.

[0495] In some embodiments, an engineered human cell is provided wherein the HLA-B expression is reduced or eliminated by a gene editing system that binds to an HLA-B genomic target sequence comprising at least 5 contiguous nucleotides within the genomic coordinates chr6:31355198-31355218.

[0496] In some embodiments, an engineered human cell is provided wherein the HLA-B expression is reduced or eliminated by a gene editing system that binds to an HLA-B genomic target sequence comprising at least 5 contiguous nucleotides within the genomic coordinates chr6:31355320-31355340.

[0497] In some embodiments, an engineered human cell is provided wherein the HLA-B expression is reduced or eliminated by a gene editing system that binds to an HLA-B genomic target sequence comprising at least 5 contiguous nucleotides within the genomic coordinates chr6:31355319-31355339.

[0498] In some embodiments, an engineered human cell is provided wherein the HLA-B expression is reduced or eliminated by a gene editing system that binds to an HLA-B genomic target sequence comprising at least 5 contiguous nucleotides within the genomic coordinates chr6:31355178-31355198.

[0499] In some embodiments, an engineered human cell is provided wherein the HLA-B expression is reduced or eliminated by a gene editing system that binds to an HLA-B genomic target sequence comprising at least 5 contiguous nucleotides within the genomic coordinates chr6:31355347-31355367.

[0500] In some embodiments, an engineered human cell is provided wherein the HLA-B expression is reduced or eliminated by a gene editing system that binds to an HLA-B genomic target sequence comprising at least 5 contiguous nucleotides within the genomic coordinates chr6:31355432-31355452.

[0501] In some embodiments, an engineered human cell is provided wherein the HLA-B expression is reduced or eliminated by a gene editing system that binds to an HLA-B genomic target sequence comprising at least 5 contiguous nucleotides within the genomic coordinates chr6:31355340-31355360.

[0502] In some embodiments, an engineered human cell is provided wherein the HLA-B expression is reduced or eliminated by a gene editing system that binds to an HLA-B genomic target sequence comprising at least 5 contiguous nucleotides within the genomic coordinates chr6:31355576-31355596.

[0503] In some embodiments, an engineered human cell is provided wherein the HLA-B expression is reduced or eliminated by a gene editing system that binds to an HLA-B genomic target sequence comprising at least 5 contiguous nucleotides within the genomic coordinates chr6:31355410-31355430.

[0504] In some embodiments, an engineered human cell is provided wherein the HLA-B expression is reduced or eliminated by a gene editing system that binds to an HLA-B genomic target sequence comprising at least 5 contiguous nucleotides within the genomic coordinates chr6:31355419-31355439.

[0505] In some embodiments, an engineered human cell is provided wherein the HLA-B expression is reduced or eliminated by a gene editing system that binds to an HLA-B genomic target sequence comprising at least 5 contiguous nucleotides within the genomic coordinates chr6:31355414-31355434.

[0506] In some embodiments, an engineered human cell is provided wherein the HLA-B expression is reduced or eliminated by a gene editing system that binds to an HLA-B genomic target sequence comprising at least 5 contiguous nucleotides within the genomic coordinates chr6:31355409-31355429.

[0507] In some embodiments, an engineered human cell is provided wherein the HLA-B expression is reduced or eliminated by a gene editing system that binds to an HLA-B genomic target sequence comprising at least 5 contiguous nucleotides within the genomic coordinates chr6:31356777-31356801.

[0508] In some embodiments, an engineered human cell is provided wherein the HLA-B expression is reduced or eliminated by a gene editing system that binds to an HLA-B genomic target sequence comprising at least 5 contiguous nucleotides within the genomic coordinates chr6:31355492-31355516.

[0509] In some embodiments, an engineered human cell is provided wherein the HLA-B expression is reduced or eliminated by a gene editing system that binds to an HLA-B genomic target sequence comprising at least 5 contiguous nucleotides within the genomic coordinates chr6:31355491-31355515.

[0510] In some embodiments, an engineered human cell is provided wherein the HLA-B expression is reduced or eliminated by a gene editing system that binds to an HLA-B genomic target sequence comprising at least 5 contiguous nucleotides within the genomic coordinates 31355469-31355493.

[0511] In some embodiments, an engineered human cell is provided wherein the HLA-B expression is reduced or eliminated by a gene editing system that binds to an HLA-B genomic target sequence comprising at least 5 contiguous nucleotides within the genomic coordinates 31355460-31355484.

[0512] In some embodiments, an engineered human cell is provided wherein the HLA-B expression is reduced or eliminated by a gene editing system that binds to an HLA-B genomic target sequence comprising at least 5 contiguous nucleotides within the genomic coordinates 31355419-31355443.

[0513] In some embodiments, an engineered human cell is provided wherein the HLA-B expression is reduced or eliminated by a gene editing system that binds to an HLA-B genomic target sequence comprising at least 5 contiguous nucleotides within the genomic coordinates 31355415-31355439.

[0514] In some embodiments, an engineered human cell is provided wherein the HLA-B expression is reduced or eliminated by a gene editing system that binds to an HLA-B genomic target sequence comprising at least 5 contiguous nucleotides within the genomic coordinates chr6:31355417-31355441.

[0515] In some embodiments, an engineered human cell is provided wherein the HLA-B expression is reduced or eliminated by a gene editing system that binds to an HLA-B genomic target sequence comprising at least 5 contiguous nucleotides within the genomic coordinates chr6:31355401-31355425.

[0516] In some embodiments, an engineered human cell is provided wherein the HLA-B expression is reduced or eliminated by a gene editing system that binds to an HLA-B genomic target sequence comprising at least 5 contiguous nucleotides within the genomic coordinates chr6:31355390-31355414.

[0517] In some embodiments, an engineered human cell is provided wherein the HLA-B expression is reduced or eliminated by a gene editing system that binds to an HLA-B genomic target sequence comprising at least 5 contiguous nucleotides within the genomic coordinates 31355379-31355403.

[0518] In some embodiments, an engineered human cell is provided wherein the HLA-B expression is reduced or eliminated by a gene editing system that binds to an HLA-B genomic target sequence comprising at least 5 contiguous nucleotides within the genomic coordinates 31355378-31355402.

[0519] In some embodiments, an engineered human cell is provided wherein the HLA-B expression is reduced or eliminated by a gene editing system that binds to an HLA-B genomic target sequence comprising at least 5 contiguous nucleotides within the genomic coordinates chr6:31355369-31355393.

[0520] In some embodiments, an engineered human cell is provided wherein the HLA-B expression is reduced or eliminated by a gene editing system that binds to an HLA-B genomic target sequence comprising at least 5 contiguous nucleotides within the genomic coordinates chr 6:31355361-31355385.

[0521] In some embodiments, an engineered human cell is provided wherein the HLA-B expression is reduced or eliminated by a gene editing system that binds to an HLA-B genomic target sequence comprising at least 5 contiguous nucleotides within the genomic coordinates chr 6:31355366-31355390.

[0522] In some embodiments, an engineered human cell is provided wherein the HLA-B expression is reduced or eliminated by a gene editing system that binds to an HLA-B genomic target sequence comprising at least 5 contiguous nucleotides within the genomic coordinates chr 6:31355356-31355380.

[0523] In some embodiments, an engineered human cell is provided wherein the HLA-B expression is reduced or eliminated by a gene editing system that binds to an HLA-B genomic target sequence comprising at least 5 contiguous nucleotides within the genomic coordinates chr6:31355221-31355245.

[0524] In some embodiments, an engineered human cell is provided wherein the HLA-B expression is reduced or eliminated by a gene editing system that binds to an HLA-B genomic target sequence comprising at least 5 contiguous nucleotides within the genomic coordinates chr6:31355222-31355246.

[0525] In some embodiments, an engineered human cell is provided wherein the HLA-B expression is reduced or eliminated by a gene editing system that binds to an HLA-B genomic target sequence comprising at least 5 contiguous nucleotides within the genomic coordinates chr6:31355205-31355229.

[0526] In some embodiments, an engineered human cell is provided wherein the HLA-B expression is reduced or eliminated by a gene editing system that binds to an HLA-B genomic target sequence comprising at least 5 contiguous nucleotides within the genomic coordinates chr6:31355446-31355470.

[0527] In some embodiments, an engineered human cell is provided wherein the HLA-B expression is reduced or eliminated by a gene editing system that binds to an HLA-B genomic target sequence comprising at least 5 contiguous nucleotides within the genomic coordinates chr6:31356425-31356449.

[0528] In some embodiments, an engineered human cell is provided wherein the HLA-B expression is reduced or eliminated by a gene editing system that binds to an HLA-B genomic target sequence comprising at least 5 contiguous nucleotides within the genomic coordinates chr6:31355441-31355465.

[0529] In some embodiments, an engineered human cell is provided wherein the HLA-B expression is reduced or eliminated by a gene editing system that binds to an HLA-B genomic target sequence comprising at least 5 contiguous nucleotides within the genomic coordinates chr6:31355203-31355227.

[0530] In some embodiments, an engineered human cell is provided wherein the HLA-B expression is reduced or eliminated by a gene editing system that binds to an HLA-B genomic target sequence comprising at least 5 contiguous nucleotides within the genomic coordinates chr6:31356437-31356461.

[0531] In some embodiments, an engineered human cell is provided wherein the HLA-B expression is reduced or eliminated by a gene editing system that binds to an HLA-B genomic target sequence comprising at least 5 contiguous nucleotides within the genomic coordinates chr6:31356426-31356450.

[0532] In some embodiments, an engineered human cell is provided wherein the HLA-B expression is reduced or eliminated by a gene editing system that binds to an HLA-B genomic target sequence comprising at least 5 contiguous nucleotides within the genomic coordinates chr6:31356763-31356787.

[0533] In some embodiments, an engineered human cell is provided wherein the HLA-B expression is reduced or eliminated by a gene editing system that binds to an HLA-B genomic target sequence comprising at least 5 contiguous nucleotides within the genomic coordinates chr6:31356764-31356788.

[0534] In some embodiments, an engineered human cell is provided wherein the HLA-B expression is reduced or eliminated by a gene editing system that binds to an HLA-B genomic target sequence comprising at least 5 contiguous nucleotides within the genomic coordinates chr6:31356762-31356786.

[0535] In some embodiments, an engineered human cell is provided wherein the HLA-B expression is reduced or eliminated by a gene editing system that binds to an HLA-B genomic target sequence comprising at least 5 contiguous nucleotides within the genomic coordinates chr6:31355204-31355228.

[0536] In some embodiments, an engineered human cell is provided wherein the HLA-B expression is reduced or eliminated by a gene editing system that binds to an HLA-B genomic target sequence comprising at least 5 contiguous nucleotides within the genomic coordinates chr6:31356436-31356460.

[0537] In some embodiments, an engineered human cell is provided wherein the HLA-B expression is reduced or eliminated by a gene editing system that binds to an HLA-B genomic target sequence comprising at least 5 contiguous nucleotides within the genomic coordinates chr6:31356767-31356791.

[0538] In some embodiments, the HLA-B genomic target sequence comprises at least 10 contiguous nucleotides within the genomic coordinates. In some embodiments, the HLA-B genomic target sequence comprises at least 15 contiguous nucleotides within the genomic coordinates.

[0539] In some embodiments, the HLA-B genomic target sequence comprises at least 17, 18, 19 20, 21, 22, 23, or 24 contiguous nucleotides within the genomic coordinates.

[0540] In some embodiments, the gene editing system comprises a transcription activator-like effector nuclease (TALEN). In some embodiments, the gene editing system comprises a zinc finger nuclease. In some embodiments, the gene editing system comprises a CRISPR/Cas system, such as a class 2 system. In some embodiments, the gene editing system comprises an RNA-guided DNA-binding agent or a nucleic acid encoding an RNA-guided DNA binding agent.

[0541] Exemplary RNA-guided DNA binding agents are shown in Table 1A below.

TABLE 1A
Exemplary RNA-guided DNA binding agents.

| RNA-guided DNA binding agent | PAM | Guide Length |
|---|---|---|
| Cas9 nuclease from S. pyogenes | NGG | 20 bp |
| Cas9 nuclease from Neisseria | NNNNG[A/C]TT | 20 bp |
| meningitidis | | |
| Cas9 nuclease from Streptococcus | NNAGAAW | 20 bp |
| thermophilus | | |
| Cas9 | NNG(A/G)(A/G)T | 20 bp |
| nuclease is from Staphylococcus | | |
| aureus | | |
| Cpf1 nuclease | TTTN | 23 bp |
| from Francisella novicida | | |
| Cpf1 nuclease | TTTV | 23 bp |
| from Acidaminococcus sp. | | |
| Cpf1 nuclease | TTTV | 23 bp |
| from Lachnospiraceae bacterium | | |
| C-to-T base editor* | NGG | 20 bp |
| A-to-G base editor* | NGG | 20 bp |
| Cas12a | same as Cpf1 | |
| CasX | TTCN | 20 bp |
| NME2 | NNNNCC | 24 bp |

*Exemplary base editor based on deaminase-SpyCas9 nickase. As is apparent, the base editor specificity, including PAM, will vary with its nickase.

[0542] In some embodiments, the RNA-guided DNA-binding agent or nucleic acid encoding the RNA-guided DNA binding agent comprises a Cas9 protein. In some embodiments, the RNA-guided DNA binding agent is selected from one of: S. pyogenes Cas9, Neisseria meningitidis Cas9, e.g. an Nme2Cas9, S. thermophilus Cas9, S. aureus Cas9, Francisella novicida Cpf1, Acidaminococcus sp. Cpf1, Lachnospiraceae bacterium Cpf1, C-to-T base editor, A-to-G base editor, Cas12a, Mad7 nuclease, ARCUS nucleases, and CasX. In some embodiments, the RNA-guided DNA binding agent comprises a polypeptide selected from one of: S. pyogenes Cas9, Neisseria meningitidis Cas9, e.g. an Nme2Cas9, S. thermophilus Cas9, S. aureus Cas9, Francisella novicida Cpf1, Acidaminococcus sp. Cpf1, Lachnospiraceae bacterium Cpf1, C-to-T base editor, A-to-G base editor, Cas12a, and CasX.

[0543] In some embodiments, the RNA-guided DNA-binding agent or nucleic acid encoding the RNA-guided DNA binding agent is S. pyogenes Cas9. In some embodiments, the RNA-guided DNA-binding agent or nucleic acid encoding the RNA-guided DNA binding agent is N. meningitidis Cas9, e.g. Nme2Cas9. In some embodiments, the RNA-guided DNA-binding agent or nucleic acid encoding the RNA-guided DNA binding agent is S. thermophilus Cas9. In some embodiments, the RNA-guided DNA-binding agent or nucleic acid encoding the RNA-guided DNA binding agent is S. aureus Cas9. In some embodiments, the RNA-guided DNA-binding agent or nucleic acid encoding the RNA-guided DNA binding agent is Cpf1 from F. novicida. In some embodiments, the RNA-guided DNA-binding agent or nucleic acid encoding the RNA-guided DNA binding agent is Cpf1 from Acidaminococcus sp. In some embodiments, the RNA-guided DNA-binding agent or nucleic acid encoding the RNA-guided DNA binding agent is Cpf1 from Lachnospiraceae bacterium ND2006. In some embodiments, the RNA-guided DNA-binding agent or nucleic acid encoding the RNA-guided DNA binding agent is a C to T base editor. In some embodiments, the RNA-guided DNA-binding agent or nucleic acid encoding the RNA-guided DNA binding agent is a A to G base editor. In some embodiments, the base editor comprises a deaminase and an RNA-guided nickase. In some embodiments, the RNA-guided DNA-binding agent or nucleic acid encoding the RNA-guided DNA binding agent comprises a APOBEC3A deaminase (A3A) and an RNA-guided nickase. In some embodiments, the RNA-guided nickase is a SpyCas9 nickase. In some embodiments, the RNA-guided nickase comprises an NmeCas9 nickase. In some embodiments, the RNA-guided DNA-binding agent or nucleic acid encoding the RNA-guided DNA binding agent is Cas12a. In some embodiments, the RNA-guided DNA-binding agent or nucleic acid encoding the RNA-guided DNA binding agent is CasX.

[0544] In any of the above embodiments, the C comprises an RNA-guided DNA binding agent, or a nucleic acid encoding an RNA-guided DNA binding agent. In some embodiments, the RNA-guided DNA binding agent comprises a Cas9. In some embodiments, the RNA-guided DNA binding agent is an S. pyogenes Cas9. In some embodiments, the RNA-guided DNA binding agent is a base editor. In some embodiments the base editor comprises a C to T deaminase and an RNA-guided nickase such as an S. pyogenes Cas9 nickase. In some embodiments the base editor comprises a A to G deaminase and an RNA-guided nickase such as an S. pyogenes Cas9 nickase.

[0545] In any of the above embodiments, the gene editing system comprises an RNA-guided DNA binding agent, or a nucleic acid encoding an RNA-guided DNA binding agent. In some embodiments, the RNA-guided DNA binding agent comprises a Cas9. In some embodiments, the RNA-guided DNA binding agent is an N. meningitidis or Nme2 Cas9. In some embodiments, the RNA-guided DNA binding agent is a base editor. In some embodiments the base editor comprises a C to T deaminase and an RNA-guided nickase such as an N. meningitidis or Nme2 Cas9 nickase. In some embodiments the base editor comprises a A to G deaminase and an RNA-guided nickase such as an N. meningitidis or Nme2 Cas9 nickase.

[0546] In some embodiments, the gene editing system further comprises a uracil glycosylase inhibitor (UGI), and the UGI and the base editor are comprised in a single polypeptide. In some embodiments, the gene editing system comprises a UGI, and the UGI and the base editor are comprised in different polypeptides. In some embodiments, the base editor comprises a cytidine deaminase and an RNA-guided nickase. In some embodiments, the cytidine deaminase, the RNA-guided nickase, and the UGI are comprised in a single polypeptide. In some embodiments, the cytidine deaminase, the RNA-guided nickase, and the UGI are comprised in different polypeptides. In some embodiments, the cytidine deaminase and the RNA-guided nickase are comprised in a single polypeptide, and wherein the UGI is comprised in a different polypeptide.

[0547] In some embodiments, when the engineered cell is homozygous for HLA-A, the HLA-A allele is selected from any one of the following HLA-A alleles: HLA-A*02:01; HLA-A*01:01; HLA-A*03:01; HLA-A*11:01; HLA-A*26:01; HLA-A*68:01; HLA-A*29:02; HLA-A*31:01; HLA-A*32:01; HLA-A*30:02; HLA-A*25:01; HLA-A*33:01; HLA-A*02:02; HLA-A*74:01; HLA-A*02:02; HLA-A*29:01; HLA-A*02:03; HLA-A*02:05; HLA-A*24:07; HLA-A*11:02; HLA-A*36:01; HLA-A*02:22; HLA-A*34:02; HLA-A*01:03; HLA-A*24:02; HLA-A*02:07; HLA-A*23:01; HLA-A*30:01; HLA-A*33:03; HLA-A*02:06; HLA-A*34:02; and HLA-A*68:02.

[0548] In some embodiments, when the engineered cell is homozygous for HLA-C, the HLA-C allele is selected from any one of the following HLA-C alleles: HLA-C*07:02; HLA-C*07:01; HLA-C*05:01; HLA-C*04:01 HLA-C*03:04; HLA-C*06:02; HLA-C*08:02; HLA-C*08:01; HLA-C*03:02; HLA-C*16:01; HLA-C*15:02; HLA-C*03:04; HLA-C*12:03; HLA-C*02:10; HLA-C*05:01; HLA-C*12:02; HLA-C*14:02; HLA-C*04:01; HLA-C*03:03; HLA-C*07:04; HLA-C*17:01; HLA-C*01:02; and HLA-C*02:02.

[0549] In some embodiments, when the engineered cell is homozygous for HLA-C, the HLA-C allele is HLA-C*03:04. In some embodiments, when the engineered cell is homozygous for HLA-C, the HLA-C allele is HLA-C*06:02. In some embodiments, when the engineered cell is homozygous for HLA-C, the HLA-C allele is HLA-C*01:02. In some embodiments, when the engineered cell is homozygous for HLA-C, the HLA-C allele is HLA-C*08:01. In some embodiments, when the engineered cell is homozygous for HLA-C, the HLA-C allele is HLA-C*03:02.

[0550] In some embodiments, the engineered cell is homozygous for HLA-A and homozygous for HLA-C, the HLA-A and HLA-C allele pair is selected from the following: HLA-A*01:01 and HLA-C*07:01; HLA-A*02:01 and HLA-C*07:02; HLA-A*02:01 and HLA-C*05:01; HLA-A*03:01 and HLA-C*07:02; HLA-A*02:01 and HLA-C*04:01; HLA-A*02:01 and HLA-C*03:04; HLA-A*01:01 and HLA-C*06:02; HLA-A*03:01 and HLA-C*04:01; HLA-A*02:01 and HLA-C*07:01; HLA-A*24:02 and HLA-C*04:01; HLA-A*29:02 and HLA-C*16:01; HLA-A*02:01 and HLA-C*06:02; HLA-A*24:02 and HLA-C*07:02; HLA-A*26:01 and HLA-C*12:03; HLA-A*11:01 and HLA-C*04:01; HLA-A*25:01 and HLA-C*12:03; HLA-A*02:01 and HLA-C*02:02; HLA-A*24:02 and HLA-C*03:03; HLA-A*30:01 and HLA-C*06:02; HLA-A*02:01 and HLA-C*01:02; HLA-A*11:01 and HLA-C*07:02; HLA-A*03:01 and HLA-C*07:01; HLA-A*23:01 and HLA-C*04:01; HLA-A*24:02 and HLA-C*07:01; HLA-A*31:01 and HLA-C*03:04; HLA-A*33:01 and HLA-C*08:02; HLA-A*02:01 and HLA-C*03:03; HLA-A*11:01 and HLA-C*01:02; HLA-A*01:01 and HLA-C*04:01; HLA-A*03:01 and HLA-C*06:02.

[0551] The HLA-A and HLA-C allele pairs disclosed herein cumulatively cover about 810% of the population. The cumulative frequency of HLA-A and HLA-C allele pairs is shown in Table 1B below.

TABLE 1B
Cumulative Frequency of HLA-A and
HLA-C Alleles in the Population.

| Cumulative Frequency | Alleles |
|---|---|
| 0.136 | HLA-A*01:01 and HLA- C*07:01 |
| 0.231 | HLA-A*02:01 and HLA-C*07:02 |
| 0.299 | HLA-A*02:01 and HLA-C*05:01 |
| 0.361 | HLA-A*03:01 and HLA-C*07:02 |
| 0.417 | HLA-A*02:01 and HLA-C*04:01 |
| 0.460 | HLA-A*02:01 and HLA-C*03:04 |
| 0.493 | HLA-A*01:01 and HLA-C*06:02 |
| 0.524 | HLA-A*03:01 and HLA-C*04:01 |
| 0.554 | HLA-A*02:01 and HLA-C*07:01 |
| 0.579 | HLA-A*24:02 and HLA-C*04:01 |
| 0.600 | HLA-A*29:02 and HLA-C*16:01 |
| 0.621 | HLA-A*02:01 and HLA-C*06:02 |
| 0.640 | HLA-A*24:02 and HLA-C*07:02 |
| 0.657 | HLA-A*26:01 and HLA-C*12:03 |
| 0.673 | HLA-A*11:01 and HLA-C*04:01 |
| 0.686 | HLA-A*25:01 and HLA-C*12:03 |
| 0.698 | HLA-A*02:01 and HLA-C*02:02 |
| 0.710 | HLA-A*24:02 and HLA-C*03:03 |
| 0.720 | HLA-A*30:01 and HLA-C*06:02 |
| 0.730 | HLA-A*02:01 and HLA-C*01:02 |
| 0.740 | HLA-A*11:01 and HLA-C*07:02 |
| 0.749 | HLA-A*03:01 and HLA-C*07:01 |
| 0.758 | HLA-A*23:01 and HLA-C*04:01 |
| 0.766 | HLA-A*24:02 and HLA-C*07:01 |
| 0.773 | HLA-A*31:01 and HLA-C*03:04 |
| 0.780 | HLA-A*33:01 and HLA-C*08:02 |
| 0.787 | HLA-A*02:01 and HLA-C*03:03 |
| 0.794 | HLA-A*11:01 and HLA-C*01:02 |
| 0.800 | HLA-A*01:01 and HLA-C*04:01 |
| 0.806 | HLA-A*03:01 and HLA-C*06:02 |

[0552] In some embodiments, an engineered human cell which has reduced or eliminated surface expression of HLA-B protein relative to an unmodified cell is provided, that is homozygous for HLA-A and homozygous for HLA-C, further has reduced or eliminated surface expression of MHC class II protein. In some embodiments, the engineered human cell has a genetic modification in a gene that reduces or eliminates surface expression of MHC class II protein. In some embodiments, the engineered human cell has a genetic modification in the CIITA gene. In some embodiments, the engineered human cell has a genetic modification in the HLA-DR gene. In some embodiments, the engineered human cell has a genetic modification in the HLA-DQ gene. In some embodiments, the engineered human cell has a genetic modification in the HLA-DP gene. In some embodiments, the engineered human cell has a genetic modification in the RFX gene. In some embodiments, the engineered human cell has a genetic modification in the CREB gene. In some embodiments, the engineered human cell has a genetic modification in the Nuclear Factor (NF)-gamma gene.

[0553] In some embodiments, an engineered human cell which has reduced or eliminated surface expression of HLA-A and HLA-B protein relative to an unmodified cell is provided, that is homozygous for HLA-C, further has reduced or eliminated surface expression of MHC class II protein. In some embodiments, the engineered human cell has a genetic modification in a gene that reduces or eliminates surface expression of MHC class II protein. In some embodiments, the engineered human cell has a genetic modification in the CIITA gene. In some embodiments, the engineered human cell has a genetic modification in the HLA-DR gene. In some embodiments, the engineered human cell has a genetic modification in the HLA-DQ gene. In some embodiments, the engineered human cell has a genetic modification in the HLA-DP gene. In some embodiments, the engineered human cell has a genetic modification in the RFX gene. In some embodiments, the engineered human cell has a genetic modification in the CREB gene. In some embodiments, the engineered human cell has a genetic modification in the Nuclear Factor (NF)-gamma gene.

[0554] In some embodiments, an engineered human cell which has reduced or eliminated surface expression of HLA-B protein relative to an unmodified cell is provided, that is homozygous for HLA-A and homozygous for HLA-C, further has reduced or eliminated surface expression of TRAC protein. In some embodiments, an engineered human cell which has reduced or eliminated surface expression of HLA-B protein relative to an unmodified cell is provided, that is homozygous for HLA-A and HLA-C, further has reduced or eliminated surface expression of TRBC protein.

[0555] In some embodiments, an engineered human cell which has reduced or eliminated surface expression of HLA-B protein relative to an unmodified cell is provided, that is homozygous for HLA-A and homozygous for HLA-C, further has reduced or eliminated surface expression of TRAC protein. In some embodiments, an engineered human cell which has reduced or eliminated surface expression of HLA-A and HLA-B protein relative to an unmodified cell is provided, that is homozygous for HLA-C, further has reduced or eliminated surface expression of TRBC protein.

[0556] In some embodiments, an engineered human cell which has reduced or eliminated surface expression of HLA-A and HLA-B protein relative to an unmodified cell is provided, that is homozygous for HLA-C, further has reduced or eliminated surface expression of TRAC protein. In some embodiments, an engineered human cell which has reduced or eliminated surface expression of HLA-A and HLA-B protein relative to an unmodified cell is provided, that is homozygous for HLA-C, further has reduced or eliminated surface expression of TRBC protein.

[0557] In some embodiments, an engineered human cell is provided which has reduced or eliminated surface expression of HLA-B protein relative to an unmodified cell, comprising a genetic modification in the HLA-B gene, wherein the genetic modification comprises at least one nucleotide within the genomic coordinates chosen from (a) chr6:31355145-31356401 or (b) chr6: 31357084-31354647, and wherein the engineered cell further comprises a genetic modification in a gene that reduces or eliminates the surface expression of MHC class II protein. In some embodiments, an engineered human cell is provided which has reduced or eliminated surface expression of HLA-B protein relative to an unmodified cell, comprising a genetic modification in the HLA-B gene, wherein the genetic modification comprises at least one nucleotide within the genomic coordinates chosen from (a) chr6:31355182-31355596 or (b) chr6: 31355203-31356461, and wherein the engineered cell further comprises a genetic modification in the CIITA gene.

[0558] In some embodiments, an engineered human cell is provided which has reduced or eliminated surface expression of HLA-B protein relative to an unmodified cell, comprising a genetic modification in the HLA-B gene, wherein the genetic modification comprises at least one nucleotide within the genomic coordinates chosen from (a) chr6:31355182-31355596 or (b) chr6: 31355203-31356461, and wherein the engineered cell further comprises a genetic modification in the TRAC gene. In some embodiments, an engineered human cell is provided which has reduced or eliminated surface expression of HLA-B protein relative to an unmodified cell, comprising a genetic modification in the HLA-B gene, wherein the genetic modification comprises at least one nucleotide within the genomic coordinates chosen from (a) chr6: 31355182-31355596 or (b) chr6: chr6:31355203-31356461, and wherein the engineered cell further comprises a genetic modification in the TRBC gene.

[0559] In some embodiments, an engineered human cell is provided which has reduced or eliminated surface expression of HLA-A B protein relative to an unmodified cell, comprising a genetic modification in the HLA-B gene, wherein the genetic modification comprises at least one nucleotide within the genomic coordinates chosen from (a) chr6:31354480-31357174; chr631355145-31356401 or (b) chr6: chr6:31355203-31356461, and wherein the engineered cell further comprises an exogenous nucleic acid. In some embodiments, the engineered cell comprises an exogenous nucleic acid encoding a targeting receptor that is expressed on the surface of the engineered cell. In some embodiments, the targeting receptor is a CAR or a universal CAR. In some embodiments, the targeting receptor is a TCR. In some embodiments, the targeting receptor is a WT1 TCR. In some embodiments, the targeting receptor is a ligand for the receptor. In some embodiments, the targeting receptor is a hybrid CAR/TCR. In some embodiments, the targeting receptor comprises an antigen recognition domain (e.g., a cancer antigen recognition domain) and a subunit of a TCR. In some embodiments, the targeting receptor is a cytokine receptor. In some embodiments, the targeting receptor is a chemokine receptor. In some embodiments, the targeting receptor is a B cell receptor (BCR). In some embodiments, the engineered cell further comprises an exogenous nucleic acid encoding a polypeptide that is secreted by the engineered cell (i.e., a soluble polypeptide). In some embodiments, the exogenous nucleic acid encodes a therapeutic polypeptide. In some embodiments, the secreted polypeptide is an antibody. In some embodiments, the secreted polypeptide is an enzyme. In some embodiments, the exogenous nucleic acid encodes an antibody encodes a cytokine. In some embodiments, the exogenous nucleic acid encodes a chemokine. In some embodiments, the exogenous nucleic acid encodes a fusion protein.

[0560] The engineered human cell may be any of the exemplary cell types disclosed herein. Further, because MHC class I molecules are expressed on all nucleated cells, the engineered human cell may be any nucleated cell. In some embodiments, the engineered cell is an immune cell. In some embodiments, the engineered cell is a stem cell such as a hematopoietic stem cell (HSC). In some embodiments, the engineered cell is an induced pluripotent stem cell (iPSC). In some embodiments, the engineered cell is a mesenchymal stem cell (MSC). In some embodiments, the engineered cell is a neural stem cell (NSC). In some embodiments, the engineered cell is a limbal stem cell (LSC). In some embodiments, the engineered cell is a progenitor cell, e.g. an endothelial progenitor cell or a neural progenitor cell. In some embodiments, the engineered cell is a tissue-specific primary cell. In some embodiments, the engineered cell is chosen from: chondrocyte, myocyte, and keratinocyte. In some embodiments, the engineered cell is a monocyte, macrophage, mast cell, dendritic cell, or granulocyte. In some embodiments, the engineered cell is monocyte. In some embodiments, the engineered cell is a macrophage. In some embodiments, the engineered cell is a mast cell. In some embodiments, the engineered cell is a dendritic cell. In some embodiments, the engineered cell is a granulocyte. In some embodiments, the engineered cell is a lymphocyte. In some embodiments, the engineered cell is a T cell. In some embodiments, the engineered cell is a CD4+ T cell. In some embodiments, the engineered cell is a CD8+ T cell. In some embodiments, the engineered cell is a memory T cell. In some embodiments, the engineered cell is a B cell. In some embodiments, the engineered cell is a plasma B cell. In some embodiments, the engineered cell is a memory B cell. In some embodiments, the engineered cell is a macrophage.

[0561] In some embodiments, the disclosure provides a pharmaceutical composition comprising any one of the engineered human cells disclosed herein. In some embodiments, the pharmaceutical composition comprises a population of any one of the engineered cells disclosed herein. In some embodiments, the population of engineered cells is at least 65% HLA-B negative as measured by flow cytometry. In some embodiments, the population of engineered cells is at least 70% HLA-B negative as measured by flow cytometry. In some embodiments, the population of engineered cells is at least 80% HLA-B negative as measured by flow cytometry. In some embodiments, the population of engineered cells is at least 90% HLA-B negative as measured by flow cytometry. In some embodiments, the population of engineered cells is at least 91% negative as measured by flow cytometry. In some embodiments, the population of engineered cells that is at least 92% HLA-B negative as measured by flow cytometry. In some embodiments, the population of engineered cells is at least 93% HLA-B negative as measured by flow cytometry. In some embodiments, the population of engineered cells is at least 94% HLA-B negative as measured by flow cytometry.

[0562] In some embodiments, the population of cells is at least 94% HLA-A negative or at least 94% HLA-B negative, as measured by flow cytometry. In some embodiments, the population of cells is at least 95% HLA-A negative or at least 95% HLA-B negative, as measured by flow cytometry. In some embodiments, the population of cells is at least 96% HLA-A negative or at least 96% HLA-B negative, as measured by flow cytometry. In some embodiments, the population of cells is at least 97% HLA-A negative or at least 97% HLA-B negative, as measured by flow cytometry. In some embodiments, the population of cells is at least 98% HLA-A negative or at least 98% HLA-B negative as measured by flow cytometry. In some embodiments, the population of cells is at least 99% HLA-A negative or at least 98% HLA-B negative as measured by flow cytometry.

[0563] In some embodiments, the population of cells is at least 94% HLA-A negative and at least 94% HLA-B negative, as measured by flow cytometry. In some embodiments, the population of cells is at least 95% HLA-A negative and at least 95% HLA-B negative, as measured by flow cytometry. In some embodiments, the population of cells is at least 96% HLA-A negative and at least 96% HLA-B negative, as measured by flow cytometry. In some embodiments, the population of cells is at least 97% HLA-A negative and at least 97% HLA-B negative, as measured by flow cytometry. In some embodiments, the population of cells is at least 98% HLA-A negative and at least 98% HLA-B negative as measured by flow cytometry. In some embodiments, the population of cells is at least 99% HLA-A negative and at least 98% HLA-B negative as measured by flow cytometry.

[0564] In some embodiments, at least 92% of the population of cells comprises the genetic modification in the HLA-A gene or 92% of the population of cells comprises the genetic modification in the HLA-B gene, as measured by next-generation sequencing (NGS). In some embodiments, the population of cells is at least 93% HLA-A negative or at least 93% HLA-B negative, as measured by flow cytometry. In some embodiments, at least 93% of the population of cells comprises the genetic modification in the HLA-A gene or at least 93% of the population of cells comprises the genetic modification in the HLA-B gene, as measured by next-generation sequencing (NGS). In some embodiments, at least 94% of the population of cells comprises the genetic modification in the HLA-A gene or at least 94% of the population of cells comprises the genetic modification in the HLA-B gene, as measured by next-generation sequencing (NGS). In some embodiments, at least 95% of the population of cells comprises the genetic modification in the HLA-A gene or at least 95% of the population of cells comprises the genetic modification in the HLA-B gene, as measured by next-generation sequencing (NGS). In some embodiments, at least 96% of the population of cells comprises the genetic modification in the HLA-A gene or at least 96% of the population of cells comprises the genetic modification in the HLA-B gene, as measured by next-generation sequencing (NGS). In some embodiments, at least 96% of the population of cells comprises the genetic modification in the HLA-A gene or at least 97% of the population of cells comprises the genetic modification in the HLA-B gene, as measured by next-generation sequencing (NGS). In some embodiments, at least 96% of the population of cells comprises the genetic modification in the HLA-A gene or at least 98% of the population of cells comprises the genetic modification in the HLA-B gene, as measured by next-generation sequencing (NGS). In some embodiments, at least 96% of the population of cells comprises the genetic modification in the HLA-A gene or at least 99% of the population of cells comprises the genetic modification in the HLA-B gene, as measured by next-generation sequencing (NGS).

[0565] In some embodiments, the population of cells is at least 95% CIITA negative as measured by flow cytometry. In some embodiments, the population of cells is at least 96% CIITA negative as measured by flow cytometry. In some embodiments, the population of cells is at least 97% CIITA negative as measured by flow cytometry. In some embodiments, the population of cells is at least 98% CIITA negative as measured by flow cytometry. In some embodiments, the population of cells is at least 99% CIITA negative as measured by flow cytometry.

[0566] In some embodiments, the population of engineered cells is at least 95% endogenous TCR protein negative as measured by flow cytometry. In some embodiments, the population of engineered cells is at least 97% endogenous TCR protein negative as measured by flow cytometry. In some embodiments, the population of engineered cells is at least 98% endogenous TCR protein negative as measured by flow cytometry. In some embodiments, the population of engineered cells is at least 99% endogenous TCR protein negative as measured by flow cytometry. In some embodiments, the population of engineered cells is at least 99.5% endogenous TCR protein negative as measured by flow cytometry.

[0567] In some embodiments, methods are provided for administering the engineered human cells or pharmaceutical compositions disclosed herein to a subject in need thereof. In some embodiments, methods are provided for administering the engineered human cells or pharmaceutical compositions disclosed herein to a subject as an ACT therapy. In some embodiments, methods are provided for administering the engineered human cells or pharmaceutical compositions disclosed herein to a subject as a treatment for cancer. In some embodiments, methods are provided for administering the engineered human cells or pharmaceutical compositions disclosed herein to a subject as a treatment for an autoimmune disease. In some embodiments, methods are provided for administering the engineered human cells or pharmaceutical compositions disclosed herein to a subject as a treatment for an infectious disease.

### C. Methods and Compositions for Reducing or Eliminating Surface Expression of HLA-B

[0568] The present disclosure provides methods and compositions for reducing or eliminating surface expression of HLA-B protein relative to an unmodified cell by genetically modifying the HLA-B gene. The disclosure also provides methods and compositions for reducing or eliminating surface expression of both HLA-A and HLA-B protein relative to an unmodified cell by genetically modifying the HLA-A and HLA-B genes. The resultant genetically modified cell may also be referred to herein as an engineered cell. In some embodiments, an already-genetically modified (or engineered) cell may be the starting cell for further genetic modification using the methods or compositions provided herein. In some embodiments, the cell is an allogeneic cell. In some embodiments, a cell with reduced or eliminated surface expression of HLA-B protein only or HLA-A and HLA-B protein is useful for adoptive cell transfer therapies. In some embodiments, editing of the HLA-A or HLA-B gene is combined with additional genetic modifications to yield a cell that is desirable for allogeneic transplant purposes.

[0569] In some embodiments, the methods comprise reducing surface expression of HLA-B protein in a human cell relative to an unmodified cell, comprising contacting a cell with composition comprising (a) a guide RNA comprising (i) a guide sequence selected from SEQ ID NOs: 1-91 and 101-185; or (ii) at least 17, 18, 19, or 20 contiguous nucleotides of a sequence selected from SEQ ID NOs: 1-91; or at least 17, 18, 19, 20, 21, 22, 23, or 24 contiguous nucleotides of a sequence selected from SEQ ID NOs: 101-185; or (iii) a guide sequence at least 95%, 90%, or 85% identical to a sequence selected from SEQ ID NOs: 1-91; or at least 95%, 90%, 85%, 80%, 75%, or 70% identical to a sequence selected from SEQ ID NOs: 101-185; or (iv) a guide sequence that binds a target site comprising a genomic region listed in Table 2 or 3; or (v) a guide sequence that is complementary to at least 17, 18, 19, or 20 contiguous nucleotides of a genomic region listed in Table 2, or a guide sequence that is complementary to at least 17, 18, 19, 20, 21, 22, 23, or 24 contiguous nucleotides of a genomic region listed in Table 3; or (vi) a guide sequence that is at least 95%, 90%, 85%, 80%, 75%, or 70% identical to a sequence selected from (v); and optionally (b) an RNA-guided DNA binding agent or a nucleic acid encoding an RNA-guided DNA binding agent.

[0570] In some embodiments, the methods further comprise contacting the cell with an RNA-guided DNA binding agent or a nucleic acid encoding an RNA-guided DNA binding agent. In some embodiments, the RNA-guided DNA binding agent comprises a Cas9 protein. In some embodiments, the RNA-guided DNA binding agent is selected from one of S. pyogenes Cas9, Neisseria meningitidis Cas9, e.g. an Nme2Cas9, S. thermophilus Cas9, S. aureus Cas9, Francisella novicida Cpf1, Acidaminococcus sp. Cpf1, Lachnospiraceae bacterium Cpf1, C-to-T base editor, A-to-G base editor, Cas12a, and CasX. In some embodiments, the RNA-guided DNA binding agent comprises a polypeptide selected from one of: S. pyogenes Cas9, Neisseria meningitidis Cas9, e.g. an Nme2Cas9, S. thermophilus Cas9, S. aureus Cas9, Francisella novicida Cpf1, Acidaminococcus sp. Cpf1, Lachnospiraceae bacterium Cpf1, C-to-T base editor, A-to-G base editor, Cas12a, and CasX. In some embodiments, the RNA-guided DNA binding agent is S. pyogenes Cas9. In some embodiments, the CIITA guide RNA is a S. pyogenes Cas9 guide RNA. In some embodiments, the RNA-guided DNA binding agent comprises a deaminase domain. In some embodiments the RNA-guided DNA binding agent comprises an APOBEC3A deaminase (A3A) and an RNA-guided nickase. In some embodiments the RNA-guided DNA binding agent is N. meningitidis Cas9, e.g., Nme2Cas9. In some embodiments the RNA-guided DNA binding agent is S. thermophilus Cas9. In some embodiments the RNA-guided DNA binding agent is S. aureus Cas9. In some embodiments the RNA-guided DNA binding agent is Cpf1 from F. novicida. In some embodiments the RNA-guided DNA binding agent is Cpf1 from Acidaminococcus sp. In some embodiments the RNA-guided DNA binding agent is Cpf1 from Lachnospiraceae bacterium ND2006. In some embodiments the RNA-guided DNA binding agent is a C to T base editor. In some embodiments the RNA-guided DNA binding agent is a A to G base editor. In some embodiments, the base editor comprises a deaminase and an RNA-guided nickase. In some embodiments the RNA-guided DNA binding agent comprises a APOBEC3A deaminase (A3A) and an RNA-guided nickase. In some embodiments, the RNA-guided nickase is a SpyCas9 nickase. In some embodiments, the RNA-guided nickase comprises an NmeCas9 nickase. In some embodiments the RNA-guided DNA binding agent is Cas12a. In some embodiments the RNA-guided DNA binding agent is CasX. In some embodiments, the surface expression of HLA-A protein (i.e., engineered cell) is thereby reduced or eliminated.

[0571] In some embodiments, the methods comprise reducing surface expression of HLA-A and HLA-B protein in a human cell relative to an unmodified cell, comprising contacting a cell with composition comprising (a) an HLA-A guide RNA comprising (i) a guide sequence selected from SEQ ID NOs: 301-590; or (ii) at least 17, 18, 19, or 20 contiguous nucleotides of a sequence selected from SEQ ID NOs: 301-428 and 463-511; or at least 17, 18, 19, 20, 21, 22, 23, or 24 contiguous nucleotides of a sequence selected from SEQ ID NOs 429-462 and 512-590; or (iii) a guide sequence at least 95%, 90%, or 85% identical to a sequence selected from SEQ ID NOs: 301-428 and 463-511; or at least 95%, 90%, 85%, 80%, 75%, or 70% identical to a sequence selected from SEQ ID NOs: 429-462 and 512-590; or (iv) a guide sequence that binds a target site comprising a genomic region listed in Tables 4-7; or (v) a guide sequence that is complementary to at least 17, 18, 19, or 20 contiguous nucleotides of a genomic region listed in Table 4, Table 5B, or Table 6, or a guide sequence that is complementary to at least 17, 18, 19, 20, 21, 22, 23, or 24 contiguous nucleotides of a genomic region listed in Table 5A or Table 7; or (vi) a guide sequence that is at least 95%, 90%, 85%, 80%, 75%, or 70% identical to a sequence selected from (v); and optionally (b) a first RNA-guided DNA binding agent or a nucleic acid encoding an RNA-guided DNA binding agent; and contacting a cell with a second composition comprising (a) an HLA-B guide RNA comprising (i) a guide sequence selected from SEQ ID NOs: 1-91 and 101-185; or (ii) at least 17, 18, 19, or 20 contiguous nucleotides of a sequence selected from SEQ ID NOs: 1-91; or at least 17, 18, 19, 20, 21, 22, 23, or 24 contiguous nucleotides of a sequence selected from SEQ ID NOs: 101-185; or (iii) a guide sequence at least 95%, 90%, or 85% identical to a sequence selected from SEQ ID NOs: 1-91; or at least 95%, 90%, 85%, 80%, 75%, or 70% identical to a sequence selected from SEQ ID NOs: 101-185; or (iv) a guide sequence that binds a target site comprising a genomic region listed in Table 2 or 3; or (v) a guide sequence that is complementary to at least 17, 18, 19, or 20 contiguous nucleotides of a genomic region listed in Table 2, or a guide sequence that is complementary to at least 17, 18, 19, 20, 21, 22, 23, or 24 contiguous nucleotides of a genomic region listed in Table 3; or (vi) a guide sequence that is at least 95%, 90%, 85%, 80%, 75%, or 70% identical to a sequence selected from (v); and optionally (b) an RNA-guided DNA binding agent or a nucleic acid encoding an RNA-guided DNA binding agent. In some embodiments, the methods further comprise contacting the cell with an RNA-guided DNA binding agent or a nucleic acid encoding an RNA-guided DNA binding agent. In some embodiments, the RNA-guided DNA binding agent comprises a Cas9 protein. In some embodiments, the RNA-guided DNA binding agent is selected from one of: S. pyogenes Cas9, Neisseria meningitidis Cas9, e.g. an Nme2Cas9, S. thermophilus Cas9, S. aureus Cas9, Francisella novicida Cpf1, Acidaminococcus sp. Cpf1, Lachnospiraceae bacterium Cpf1, C-to-T base editor, A-to-G base editor, Cas12a, and CasX. In some embodiments, the RNA-guided DNA binding agent comprises a polypeptide selected from one of: S. pyogenes Cas9, Neisseria meningitidis Cas9, e.g. an Nme2Cas9, S. thermophilus Cas9, S. aureus Cas9, Francisella novicida Cpf1, Acidaminococcus sp. Cpf1, Lachnospiraceae bacterium Cpf1, C-to-T base editor, A-to-G base editor, Cas12a, and CasX. In some embodiments, the RNA-guided DNA binding agent is S. pyogenes Cas9. In some embodiments, the CIITA guide RNA is a S. pyogenes Cas9 guide RNA. In some embodiments, the RNA-guided DNA binding agent comprises a deaminase domain. In some embodiments the RNA-guided DNA binding agent comprises an APOBEC3A deaminase (A3A) and an RNA-guided nickase. In some embodiments the RNA-guided DNA binding agent is N. meningitidis Cas9, e.g., Nme2Cas9. In some embodiments the RNA-guided DNA binding agent is S. thermophilus Cas9. In some embodiments the RNA-guided DNA binding agent is S. aureus Cas9. In some embodiments the RNA-guided DNA binding agent is Cpf1 from F. novicida. In some embodiments the RNA-guided DNA binding agent is Cpf1 from Acidaminococcus sp. In some embodiments the RNA-guided DNA binding agent is Cpf1 from Lachnospiraceae bacterium ND2006. In some embodiments the RNA-guided DNA binding agent is a C to T base editor. In some embodiments the RNA-guided DNA binding agent is a A to G base editor. In some embodiments, the base editor comprises a deaminase and an RNA-guided nickase. In some embodiments the RNA-guided DNA binding agent comprises a APOBEC3A deaminase (A3A) and an RNA-guided nickase. In some embodiments, the RNA-guided nickase is a SpyCas9 nickase. In some embodiments, the RNA-guided nickase comprises an NmeCas9 nickase. In some embodiments the RNA-guided DNA binding agent is Cas12a. In some embodiments the RNA-guided DNA binding agent is CasX. In some embodiments, the surface expression of HLA-A protein (i.e., engineered cell) is thereby reduced or eliminated.

[0572] In some embodiments, the methods comprise making an engineered human cell, which has reduced or eliminated surface expression of HLA-B protein relative to an unmodified cell, wherein the cell is homozygous for HLA-A and homozygous for HLA-C, comprising contacting a cell with composition comprising (a) a guide RNA comprising (i) a guide sequence selected from SEQ ID NOs: 1-91 and 101-185; or (ii) at least 17, 18, 19, or 20 contiguous nucleotides of a sequence selected from SEQ ID NOs: 1-91; or at least 17, 18, 19, 20, 21, 22, 23, or 24 contiguous nucleotides of a sequence selected from SEQ ID NOs: 101-185; or (iii) a guide sequence at least 95%, 90%, or 85% identical to a sequence selected from SEQ ID NOs: 1-91; or at least 95%, 90%, 85%, 80%, 75%, or 70% identical to a sequence selected from SEQ ID NOs: 101-185; or (iv) a guide sequence that binds a target site comprising a genomic region listed in Table 2 or 3; or (v) a guide sequence that is complementary to at least 17, 18, 19, or 20 contiguous nucleotides of a genomic region listed in Table 2, or a guide sequence that is complementary to at least 17, 18, 19, 20, 21, 22, 23, or 24 contiguous nucleotides of a genomic region listed in Table 3; or (vi) a guide sequence that is at least 95%, 90%, 85%, 80%, 75%, or 70% identical to a sequence selected from (v); and optionally (b) an RNA-guided DNA binding agent or a nucleic acid encoding an RNA-guided DNA binding agent. In some embodiments, the methods further comprise contacting the cell with an RNA-guided DNA binding agent or a nucleic acid encoding an RNA-guided DNA binding agent. In some embodiments, the RNA-guided DNA binding agent is Cas9. In some embodiments, the RNA-guided DNA binding agent is S. pyogenes or N. meningitidis (e.g., Nme2) Cas9. In some embodiments, the CIITA guide RNA is a S. pyogenes Cas9 guide RNA. In some embodiments, the RNA-guided DNA binding agent comprises a deaminase domain. In some embodiments the RNA-guided DNA binding agent comprises an APOBEC3A deaminase (A3A) and an RNA-guided nickase. In some embodiments, the surface expression of HLA-A B protein (i.e., engineered cell) is thereby reduced or eliminated.

[0573] In some embodiments, the methods comprise making an engineered human cell, which has reduced or eliminated surface expression of HLA-A and HLA-B protein relative to an unmodified cell, wherein the cell is homozygous for HLA-A and homozygous for HLA-C, comprising contacting a cell with composition comprising (a) an HLA-A guide RNA comprising (i) a guide sequence selected from SEQ ID NOs: 301-590; or (ii) at least 17, 18, 19, or 20 contiguous nucleotides of a sequence selected from SEQ ID NOs: 301-428 and 463-511; or at least 17, 18, 19, 20, 21, 22, 23, or 24 contiguous nucleotides of a sequence selected from SEQ ID NOs 429-462 and 512-590; or (iii) a guide sequence at least 95%, 90%, or 85% identical to a sequence selected from SEQ ID NOs: 301-428 and 463-511; or at least 95%, 90%, 85%, 80%, 75%, or 70% identical to a sequence selected from SEQ ID NOs: 429-462 and 512-590; or (iv) a guide sequence that binds a target site comprising a genomic region listed in Tables 4-7; or (v) a guide sequence that is complementary to at least 17, 18, 19, or 20 contiguous nucleotides of a genomic region listed in Tables 4, 5B and 6, or a guide sequence that is complementary to at least 17, 18, 19, 20, 21, 22, 23, or 24 contiguous nucleotides of a genomic region listed in Table 5A or Table 7; or (vi) a guide sequence that is at least 95%, 90%, 85%, 80%, 75%, or 70% identical to a sequence selected from (v); and optionally (b) a first RNA-guided DNA binding agent or a nucleic acid encoding an RNA-guided DNA binding agent; and contacting a cell with a second composition comprising (a) an HLA-B guide RNA comprising (i) a guide sequence selected from SEQ ID NOs: 1-91 and 101-185; or (ii) at least 17, 18, 19, or 20 contiguous nucleotides of a sequence selected from SEQ ID NOs: 1-91; or at least 17, 18, 19, 20, 21, 22, 23, or 24 contiguous nucleotides of a sequence selected from SEQ ID NOs: 101-185; or (iii) a guide sequence at least 95%, 90%, or 85% identical to a sequence selected from SEQ ID NOs: 1-91; or at least 95%, 90%, 85%, 80%, 75%, or 70% identical to a sequence selected from SEQ ID NOs: 101-185; or (iv) a guide sequence that binds a target site comprising a genomic region listed in Table 2 or 3; or (v) a guide sequence that is complementary to at least 17, 18, 19, or 20 contiguous nucleotides of a genomic region listed in Table 2, or a guide sequence that is complementary to at least 17, 18, 19, 20, 21, 22, 23, or 24 contiguous nucleotides of a genomic region listed in Table 3; or (vi) a guide sequence that is at least 95%, 90%, 85%, 80%, 75%, or 70% identical to a sequence selected from (v); and optionally (b) an RNA-guided DNA binding agent or a nucleic acid encoding an RNA-guided DNA binding agent. In some embodiments, the methods further comprise contacting the cell with an RNA-guided DNA binding agent or a nucleic acid encoding an RNA-guided DNA binding agent. In some embodiments, the RNA-guided DNA binding agent is Cas9. In some embodiments, the RNA-guided DNA binding agent is S. pyogenes or N. meningitidis (e.g., Nme2) Cas9. In some embodiments, the CIITA guide RNA is a S. pyogenes Cas9 guide RNA. In some embodiments, the RNA-guided DNA binding agent comprises a deaminase domain. In some embodiments the RNA-guided DNA binding agent comprises an APOBEC3A deaminase (A3A) and an RNA-guided nickase. In some embodiments, the surface expression of HLA-B protein (i.e., engineered cell) is thereby reduced or eliminated.

[0574] In some embodiments, the methods of reducing or eliminating surface expression of HLA-A or HLA-B protein comprise contacting a cell with any one or more of the HLA-A or HLA-B guide RNAs disclosed herein.

[0575] In some embodiments, compositions are provided comprising a) an HLA-B guide RNA comprising: (i) a guide sequence selected from SEQ ID NOs: 1-91 or 101-185; or (ii). at least 17, 18, 19, or 20 contiguous nucleotides of a sequence selected from SEQ ID NOs: 1-91; or at least 17, 18, 19, 20, 21, 22, 23, or 24 contiguous nucleotides of a sequence selected from SEQ ID NOs: 101-185; or (iii) a guide sequence at least 95%, 90%, or 85% identical to a sequence selected from SEQ ID NOs: 1-91; or a guide sequence at least 95%, 90%, 85%, 80%, 75%, or 70% identical to a sequence selected from SEQ ID NOs: 101-185; or (iv) a guide sequence that binds a target site comprising a genomic region listed in Tables 2-3; or (v) a guide sequence that is complementary to at least 17, 18, 19, or 20 contiguous nucleotides of a genomic region listed in Table 2 or a guide sequence that is complementary to at least 17, 18, 19, 20, 21, 22, 23, or 24 contiguous nucleotides of a genomic region listed in Table 3; or (vi) a guide sequence that is at least 95%, 90%, or 85%, 80%, 75%, or 70% identical to a sequence selected from (v); and optionally b) an RNA-guided DNA binding agent or a nucleic acid encoding an RNA-guided DNA binding agent. In some embodiments, the composition further comprises an RNA-guided DNA binding agent or a nucleic acid encoding an RNA-guided DNA binding agent. In some embodiments, the composition comprises an RNA-guided DNA binding agent that is Cas9. In some embodiments, the RNA-guided DNA binding agent is S. pyogenes Cas9. In some embodiments, the CIITA guide RNA is a S. pyogenes Cas9 guide RNA. In some embodiments, the RNA-guided DNA binding agent comprises a deaminase domain. In some embodiments the RNA-guided DNA binding agent comprises an APOBEC3A deaminase (A3A) and an RNA-guided nickase.

[0576] In some embodiments, the composition further comprises a uracil glycosylase inhibitor (UGI). In some embodiments, the composition comprises an RNA-guided DNA binding agent that the RNA-guided DNA binding agent generates a cytosine (C) to thymine (T) conversion with the HLA-A or HLA-B genomic target sequence. In some embodiments, the composition comprises an RNA-guided DNA binding agent that generates an adenosine (A) to guanine (G) conversion with the HLA-A or HLA-B genomic target sequence.

[0577] In some embodiments, an engineered human cell produced by the methods described herein is provided. In some embodiments, the engineered human cell produced by the methods and compositions described herein is an allogeneic cell. In some embodiments, the methods produce a composition comprising an engineered human cell having reduced or eliminated surface expression of HLA-A or HLA-B protein. In some embodiments, the engineered human cell produced by the methods disclosed herein elicits a reduced response from CD8+ T cells as compared to an unmodified cell as measured in an in vitro cell culture assay containing CD8+ T cells.

[0578] In some embodiments, the compositions disclosed herein further comprise a pharmaceutically acceptable carrier. In some embodiments, a cell produced by the compositions disclosed herein comprising a pharmaceutically acceptable carrier is provided. In some embodiments, compositions comprising the cells disclosed herein are provided.

### 1. HLA-B Guide RNAs

[0579] The methods and compositions provided herein disclose guide RNAs useful for reducing or eliminating the surface expression of HLA-B protein. In some embodiments, such guide RNAs direct an RNA-guided DNA binding agent to an HLA-A genomic target sequence and may be referred to herein as “HLA-B guide RNAs.” In some embodiments, the HLA-B guide RNA directs an RNA-guided DNA binding agent to a human HLA-B genomic target sequence. In some embodiments, the HLA-B guide RNA comprises a guide sequence selected from SEQ ID NOs: 1-91. In some embodiments, the HLA-B guide RNA comprises a guide sequence selected from SEQ ID NOs: 101-185.

[0580] In some embodiments, a composition is provided comprising an -B guide RNA described herein and an RNA-guided DNA binding agent or a nucleic acid encoding an RNA-guided DNA binding agent.

[0581] In some embodiments, a composition is provided comprising an HLA-B single-guide RNA (sgRNA) comprising a guide sequence selected from SEQ ID NOs: 1-91 or 101-185. In some embodiments, a composition is provided comprising HLA-B sgRNA described herein and an RNA-guided DNA binding agent or a nucleic acid encoding an RNA-guided DNA binding agent.

[0582] In some embodiments, a composition is provided comprising an HLA-B dual-guide RNA (dgRNA) comprising a guide sequence selected from SEQ ID NOs: 1-91 or 101-185. In some embodiments, a composition is provided comprising an HLA-B dgRNA described herein and an RNA-guided DNA binding agent or a nucleic acid encoding an RNA-guided DNA binding agent.

[0583] In some embodiments, the HLA-B gRNA comprises a guide sequence selected from any one of SEQ ID NOs: 1-91 or 101-185. Exemplary HLA-B guide sequences are shown below in Table 2 (SEQ ID NOs: 1-91), and Table 3 (SEQ ID NOs: 101-185).

[0584] In some embodiments, the HLA-A gRNA is a sgRNA comprising a sequence as shown below in Table 2 (SEQ ID NOs: 1001-1091 and 2001-2091), Table 3 (SEQ ID NOs: 1101-1185, and 2101-2185), and Table 3A (SEQ ID NOs: 2186-2191).

TABLE 2
Exemplary HLA-B Spy guide RNAs

| | SEQ ID | | Exemplary | Exemplary Guide | |
|---|---|---|---|---|---|
| | NO to | | Guide RNA | RNA Modified | |
| | the | | Full Sequence | Sequence | Genomic |
| Guide | Guide | Guide | (SEQ ID NOS: | (SEQ ID NOs: | Coordinates |
| ID | Sequence | Sequence | 1001-1091) | 2001-2091) | (hg38) |
| G022008 | 1 | CCAGCCUGGACG | CCAGCCUGG | mC*mC*mA*GCCUG | chr6:31355718- |
| | | CAGGCACC | ACGCAGGCA | GACGCAGGCACCG | 31355738 |
| | | | CCGUUUUAG | UUUUAGAmGmCmU | |
| | | | AGCUAGAAA | mAmGmAmAmAmU | |
| | | | UAGCAAGUU | mAmGmCAAGUUAA | |
| | | | AAAAUAAGG | AAUAAGGCUAGUC | |
| | | | CUAGUCCGU | CGUUAUCAmAmCm | |
| | | | UAUCAACUU | UmUmGmAmAmAm | |
| | | | GAAAAAGUG | AmAmGmUmGmGm | |
| | | | GCACCGAGU | CmAmCmCmGmAm | |
| | | | CGGUGCUUU | GmUmCmGmGmUm | |
| | | | U | GmCmU*mU*mU*m | |
| | | | | U | |
| G022009 | 2 | AGGCGCUUUGCA | AGGCGCUUU | mA*mG*mG*CGCUU | chr6:31355616- |
| | | UCUCUCAU | GCAUCUCUC | UGCAUCUCUCAUG | 31355636 |
| | | | AUGUUUUAG | UUUUAGAmGmCmU | |
| | | | AGCUAGAAA | mAmGmAmAmAmU | |
| | | | UAGCAAGUU | mAmGmCAAGUUAA | |
| | | | AAAAUAAGG | AAUAAGGCUAGUC | |
| | | | CUAGUCCGU | CGUUAUCAmAmCm | |
| | | | UAUCAACUU | UmUmGmAmAmAm | |
| | | | GAAAAAGUG | AmAmGmUmGmGm | |
| | | | GCACCGAGU | CmAmCmCmGmAm | |
| | | | CGGUGCUUU | GmUmCmGmGmUm | |
| | | | U | GmCmU*mU*mU*m | |
| | | | | U | |
| G022010 | 3 | AACAAUGCCCAC | AACAAUGCC | mA*mA*mC*AAUGC | chr6:31355182- |
| | | GAUGGGGA | CACGAUGGG | CCACGAUGGGGAG | 31355202 |
| | | | GAGUUUUAG | UUUUAGAmGmCmU | |
| | | | AGCUAGAAA | mAmGmAmAmAmU | |
| | | | UAGCAAGUU | mAmGmCAAGUUAA | |
| | | | AAAAUAAGG | AAUAAGGCUAGUC | |
| | | | CUAGUCCGU | CGUUAUCAmAmCm | |
| | | | UAUCAACUU | UmUmGmAmAmAm | |
| | | | GAAAAAGUG | AmAmGmUmGmGm | |
| | | | GCACCGAGU | CmAmCmCmGmAm | |
| | | | CGGUGCUUU | GmUmCmGmGmUm | |
| | | | U | GmCmU*mU*mU*m | |
| | | | | U | |
| G022011 | 4 | CCAGACACCAGC | CCAGACACC | mC*mC*mA*GACAC | chr6:31355711- |
| | | CUGGACGC | AGCCUGGAC | CAGCCUGGACGCG | 31355731 |
| | | | GCGUUUUAG | UUUUAGAmGmCmU | |
| | | | AGCUAGAAA | mAmGmAmAmAmU | |
| | | | UAGCAAGUU | mAmGmCAAGUUAA | |
| | | | AAAAUAAGG | AAUAAGGCUAGUC | |
| | | | CUAGUCCGU | CGUUAUCAmAmCm | |
| | | | UAUCAACUU | UmUmGmAmAmAm | |
| | | | GAAAAAGUG | AmAmGmUmGmGm | |
| | | | GCACCGAGU | CmAmCmCmGmAm | |
| | | | CGGUGCUUU | GmUmCmGmGmUm | |
| | | | U | GmCmU*mU*mU*m | |
| | | | | U | |
| G022012 | 5 | CCAUCUCCUAUA | CCAUCUCCU | mC*mC*mA*UCUCC | chr6:31356120- |
| | | GGUCGCCG | AUAGGUCGC | UAUAGGUCGCCGG | 31356140 |
| | | | CGGUUUUAG | UUUUAGAmGmCmU | |
| | | | AGCUAGAAA | mAmGmAmAmAmU | |
| | | | UAGCAAGUU | mAmGmCAAGUUAA | |
| | | | AAAAUAAGG | AAUAAGGCUAGUC | |
| | | | CUAGUCCGU | CGUUAUCAmAmCm | |
| | | | UAUCAACUU | UmUmGmAmAmAm | |
| | | | GAAAAAGUG | AmAmGmUmGmGm | |
| | | | GCACCGAGU | CmAmCmCmGmAm | |
| | | | CGGUGCUUU | GmUmCmGmGmUm | |
| | | | U | GmCmU*mU*mU*m | |
| | | | | U | |
| G022013 | 6 | CUUCUCUCUAGG | CUUCUCUCU | mC*mU*mU*CUCUC | chr6:31270893- |
| | | ACAAUUAA | AGGACAAUU | UAGGACAAUUAAG | 31270913 |
| | | | AAGUUUUAG | UUUUAGAmGmCmU | |
| | | | AGCUAGAAA | mAmGmAmAmAmU | |
| | | | UAGCAAGUU | mAmGmCAAGUUAA | |
| | | | AAAAUAAGG | AAUAAGGCUAGUC | |
| | | | CUAGUCCGU | CGUUAUCAmAmCm | |
| | | | UAUCAACUU | UmUmGmAmAmAm | |
| | | | GAAAAAGUG | AmAmGmUmGmGm | |
| | | | GCACCGAGU | CmAmCmCmGmAm | |
| | | | CGGUGCUUU | GmUmCmGmGmUm | |
| | | | U | GmCmU*mU*mU*m | |
| | | | | U | |
| G022014 | 7 | CCCCAUCUCCUA | CCCCAUCUC | mC*mC*mC*CAUCU | chr6:31356122- |
| | | UAGGUCGC | CUAUAGGUC | CCUAUAGGUCGCG | 31356142 |
| | | | GCGUUUUAG | UUUUAGAmGmCmU | |
| | | | AGCUAGAAA | mAmGmAmAmAmU | |
| | | | UAGCAAGUU | mAmGmCAAGUUAA | |
| | | | AAAAUAAGG | AAUAAGGCUAGUC | |
| | | | CUAGUCCGU | CGUUAUCAmAmCm | |
| | | | UAUCAACUU | UmUmGmAmAmAm | |
| | | | GAAAAAGUG | AmAmGmUmGmGm | |
| | | | GCACCGAGU | CmAmCmCmGmAm | |
| | | | CGGUGCUUU | GmUmCmGmGmUm | |
| | | | U | GmCmU*mU*mU*m | |
| | | | | U | |
| G022015 | 8 | GGAUCUCGGACC | GGAUCUCGG | mG*mG*mA*UCUCG | chr6:31354563- |
| | | CGGAGACU | ACCCGGAGA | GACCCGGAGACUG | 31354583 |
| | | | CUGUUUUAG | UUUUAGAmGmCmU | |
| | | | AGCUAGAAA | mAmGmAmAmAmU | |
| | | | UAGCAAGUU | mAmGmCAAGUUAA | |
| | | | AAAAUAAGG | AAUAAGGCUAGUC | |
| | | | CUAGUCCGU | CGUUAUCAmAmCm | |
| | | | UAUCAACUU | UmUmGmAmAmAm | |
| | | | GAAAAAGUG | AmAmGmUmGmGm | |
| | | | GCACCGAGU | CmAmCmCmGmAm | |
| | | | CGGUGCUUU | GmUmCmGmGmUm | |
| | | | U | GmCmU*mU*mU*m | |
| | | | | U | |
| G022016 | 9 | CUUCCUCCCAGU | CUUCCUCCC | mC*mU*mU*CCUCC | chr6:31354682- |
| | | CCCCUCAC | AGUCCCCUC | CAGUCCCCUCACG | 31354702 |
| | | | ACGUUUUAG | UUUUAGAmGmCmU | |
| | | | AGCUAGAAA | mAmGmAmAmAmU | |
| | | | UAGCAAGUU | mAmGmCAAGUUAA | |
| | | | AAAAUAAGG | AAUAAGGCUAGUC | |
| | | | CUAGUCCGU | CGUUAUCAmAmCm | |
| | | | UAUCAACUU | UmUmGmAmAmAm | |
| | | | GAAAAAGUG | AmAmGmUmGmGm | |
| | | | GCACCGAGU | CmAmCmCmGmAm | |
| | | | CGGUGCUUU | GmUmCmGmGmUm | |
| | | | U | GmCmU*mU*mU*m | |
| | | | | U | |
| G022017 | 10 | CUCCUGUCCCAC | CUCCUGUCC | mC*mU*mC*CUGUC | chr6:31355900- |
| | | GUCUCCUG | CACGUCUCC | CCACGUCUCCUGG | 31355920 |
| | | | UGGUUUUAG | UUUUAGAmGmCmU | |
| | | | AGCUAGAAA | mAmGmAmAmAmU | |
| | | | UAGCAAGUU | mAmGmCAAGUUAA | |
| | | | AAAAUAAGG | AAUAAGGCUAGUC | |
| | | | CUAGUCCGU | CGUUAUCAmAmCm | |
| | | | UAUCAACUU | UmUmGmAmAmAm | |
| | | | GAAAAAGUG | AmAmGmUmGmGm | |
| | | | GCACCGAGU | CmAmCmCmGmAm | |
| | | | CGGUGCUUU | GmUmCmGmGmUm | |
| | | | U | GmCmU*mU*mU*m | |
| | | | | U | |
| G022018 | 11 | CCAUUUUCCUCC | CCAUUUUCC | mC*mC*mA*UUUUC | chr6:31356086- |
| | | UCUUCUCG | UCCUCUUCU | CUCCUCUUCUCGG | 31356106 |
| | | | CGGUUUUAG | UUUUAGAmGmCmU | |
| | | | AGCUAGAAA | mAmGmAmAmAmU | |
| | | | UAGCAAGUU | mAmGmCAAGUUAA | |
| | | | AAAAUAAGG | AAUAAGGCUAGUC | |
| | | | CUAGUCCGU | CGUUAUCAmAmCm | |
| | | | UAUCAACUU | UmUmGmAmAmAm | |
| | | | GAAAAAGUG | AmAmGmUmGmGm | |
| | | | GCACCGAGU | CmAmCmCmGmAm | |
| | | | CGGUGCUUU | GmUmCmGmGmUm | |
| | | | U | GmCmU*mU*mU*m | |
| | | | | U | |
| G022019 | 12 | GGUUCCCAAGGC | GGUUCCCAA | mG*mG*mU*UCCCA | chr6:31356623- |
| | | UGCUGCAG | GGCUGCUGC | AGGCUGCUGCAGG | 31356643 |
| | | | AGGUUUUAG | UUUUAGAmGmCmU | |
| | | | AGCUAGAAA | mAmGmAmAmAmU | |
| | | | UAGCAAGUU | mAmGmCAAGUUAA | |
| | | | AAAAUAAGG | AAUAAGGCUAGUC | |
| | | | CUAGUCCGU | CGUUAUCAmAmCm | |
| | | | UAUCAACUU | UmUmGmAmAmAm | |
| | | | GAAAAAGUG | AmAmGmUmGmGm | |
| | | | GCACCGAGU | CmAmCmCmGmAm | |
| | | | CGGUGCUUU | GmUmCmGmGmUm | |
| | | | U | GmCmU*mU*mU*m | |
| | | | | U | |
| G022020 | 13 | ACAUGCCAUGUA | ACAUGCCAU | mA*mC*mA*UGCCA | chr6:31355348- |
| | | CAGCAUGA | GUACAGCAU | UGUACAGCAUGAG | 31355368 |
| | | | GAGUUUUAG | UUUUAGAmGmCmU | |
| | | | AGCUAGAAA | mAmGmAmAmAmU | |
| | | | UAGCAAGUU | mAmGmCAAGUUAA | |
| | | | AAAAUAAGG | AAUAAGGCUAGUC | |
| | | | CUAGUCCGU | CGUUAUCAmAmCm | |
| | | | UAUCAACUU | UmUmGmAmAmAm | |
| | | | GAAAAAGUG | AmAmGmUmGmGm | |
| | | | GCACCGAGU | CmAmCmCmGmAm | |
| | | | CGGUGCUUU | GmUmCmGmGmUm | |
| | | | U | GmCmU*mU*mU*m | |
| | | | | U | |
| G022021 | 14 | CGGUUCCCAAGG | CGGUUCCCA | mC*mG*mG*UUCCC | chr6:31355899- |
| | | CUGCUGCA | AGGCUGCUG | AAGGCUGCUGCAG | 31355919 |
| | | | CAGUUUUAG | UUUUAGAmGmCmU | |
| | | | AGCUAGAAA | mAmGmAmAmAmU | |
| | | | UAGCAAGUU | mAmGmCAAGUUAA | |
| | | | AAAAUAAGG | AAUAAGGCUAGUC | |
| | | | CUAGUCCGU | CGUUAUCAmAmCm | |
| | | | UAUCAACUU | UmUmGmAmAmAm | |
| | | | GAAAAAGUG | AmAmGmUmGmGm | |
| | | | GCACCGAGU | CmAmCmCmGmAm | |
| | | | CGGUGCUUU | GmUmCmGmGmUm | |
| | | | U | GmCmU*mU*mU*m | |
| | | | | U | |
| G022022 | 15 | AACGCGCCUGGG | AACGCGCCU | mA*mA*mC*GCGCC | chr6:31356539- |
| | | GCUCUCGC | GGGGCUCUC | UGGGGCUCUCGCG | 31356559 |
| | | | GCGUUUUAG | UUUUAGAmGmCmU | |
| | | | AGCUAGAAA | mAmGmAmAmAmU | |
| | | | UAGCAAGUU | mAmGmCAAGUUAA | |
| | | | AAAAUAAGG | AAUAAGGCUAGUC | |
| | | | CUAGUCCGU | CGUUAUCAmAmCm | |
| | | | UAUCAACUU | UmUmGmAmAmAm | |
| | | | GAAAAAGUG | AmAmGmUmGmGm | |
| | | | GCACCGAGU | CmAmCmCmGmAm | |
| | | | CGGUGCUUU | GmUmCmGmGmUm | |
| | | | U | GmCmU*mU*mU*m | |
| | | | | U | |
| G022023 | 16 | UGGUGGGGGUGG | UGGUGGGGG | mU*mG*mG*UGGG | chr6:31357031- |
| | | GAGUGUGG | UGGGAGUGU | GGUGGGAGUGUGG | 31357051 |
| | | | GGGUUUUAG | GUUUUAGAmGmCm | |
| | | | AGCUAGAAA | UmAmGmAmAmAm | |
| | | | UAGCAAGUU | UmAmGmCAAGUUA | |
| | | | AAAAUAAGG | AAAUAAGGCUAGU | |
| | | | CUAGUCCGU | CCGUUAUCAmAmC | |
| | | | UAUCAACUU | mUmUmGmAmAmA | |
| | | | GAAAAAGUG | mAmAmGmUmGmG | |
| | | | GCACCGAGU | mCmAmCmCmGmA | |
| | | | CGGUGCUUU | mGmUmCmGmGmU | |
| | | | U | mGmCmU*mU*mU* | |
| | | | | mU | |
| G022024 | 17 | GAGUCUCUGAGC | GAGUCUCUG | mG*mA*mG*UCUCU | chr6:31355713- |
| | | GGGGAACA | AGCGGGGAA | GAGCGGGGAACAG | 31355733 |
| | | | CAGUUUUAG | UUUUAGAmGmCmU | |
| | | | AGCUAGAAA | mAmGmAmAmAmU | |
| | | | UAGCAAGUU | mAmGmCAAGUUAA | |
| | | | AAAAUAAGG | AAUAAGGCUAGUC | |
| | | | CUAGUCCGU | CGUUAUCAmAmCm | |
| | | | UAUCAACUU | UmUmGmAmAmAm | |
| | | | GAAAAAGUG | AmAmGmUmGmGm | |
| | | | GCACCGAGU | CmAmCmCmGmAm | |
| | | | CGGUGCUUU | GmUmCmGmGmUm | |
| | | | U | GmCmU*mU*mU*m | |
| | | | | U | |
| G022025 | 18 | GGGAGGAGCGAG | GGGAGGAGC | mG*mG*mG*AGGA | chr6:31355180- |
| | | GGGACCGC | GAGGGGACC | GCGAGGGGACCGC | 31355200 |
| | | | GCGUUUUAG | GUUUUAGAmGmCm | |
| | | | AGCUAGAAA | UmAmGmAmAmAm | |
| | | | UAGCAAGUU | UmAmGmCAAGUUA | |
| | | | AAAAUAAGG | AAAUAAGGCUAGU | |
| | | | CUAGUCCGU | CCGUUAUCAmAmC | |
| | | | UAUCAACUU | mUmUmGmAmAmA | |
| | | | GAAAAAGUG | mAmAmGmUmGmG | |
| | | | GCACCGAGU | mCmAmCmCmGmA | |
| | | | CGGUGCUUU | mGmUmCmGmGmU | |
| | | | U | mGmCmU*mU*mU* | |
| | | | | mU | |
| G022026 | 19 | UGAGGGGACUGG | UGAGGGGAC | mU*mG*mA*GGGG | chr6:31356601- |
| | | GAGGAAGC | UGGGAGGAA | ACUGGGAGGAAGC | 31356621 |
| | | | GCGUUUUAG | GUUUUAGAmGmCm | |
| | | | AGCUAGAAA | UmAmGmAmAmAm | |
| | | | UAGCAAGUU | UmAmGmCAAGUUA | |
| | | | AAAAUAAGG | AAAUAAGGCUAGU | |
| | | | CUAGUCCGU | CCGUUAUCAmAmC | |
| | | | UAUCAACUU | mUmUmGmAmAmA | |
| | | | GAAAAAGUG | mAmAmGmUmGmG | |
| | | | GCACCGAGU | mCmAmCmCmGmA | |
| | | | CGGUGCUUU | mGmUmCmGmGmU | |
| | | | U | mGmCmU*mU*mU* | |
| | | | | mU | |
| G022027 | 20 | CUGCGUCCAGGC | CUGCGUCCA | mC*mU*mG*CGUCC | chr6:31270992- |
| | | UGGUGUCU | GGCUGGUGU | AGGCUGGUGUCUG | 31271012 |
| | | | CUGUUUUAG | UUUUAGAmGmCmU | |
| | | | AGCUAGAAA | mAmGmAmAmAmU | |
| | | | UAGCAAGUU | mAmGmCAAGUUAA | |
| | | | AAAAUAAGG | AAUAAGGCUAGUC | |
| | | | CUAGUCCGU | CGUUAUCAmAmCm | |
| | | | UAUCAACUU | UmUmGmAmAmAm | |
| | | | GAAAAAGUG | AmAmGmUmGmGm | |
| | | | GCACCGAGU | CmAmCmCmGmAm | |
| | | | CGGUGCUUU | GmUmCmGmGmUm | |
| | | | U | GmCmU*mU*mU*m | |
| | | | | U | |
| G022028 | 21 | CCUCGACCGGCG | CCUCGACCG | mC*mC*mU*CGACC | chr6:31356548- |
| | | AGAGCCCC | GCGAGAGCC | GGCGAGAGCCCCG | 31356568 |
| | | | CCGUUUUAG | UUUUAGAmGmCmU | |
| | | | AGCUAGAAA | mAmGmAmAmAmU | |
| | | | UAGCAAGUU | mAmGmCAAGUUAA | |
| | | | AAAAUAAGG | AAUAAGGCUAGUC | |
| | | | CUAGUCCGU | CGUUAUCAmAmCm | |
| | | | UAUCAACUU | UmUmGmAmAmAm | |
| | | | GAAAAAGUG | AmAmGmUmGmGm | |
| | | | GCACCGAGU | CmAmCmCmGmAm | |
| | | | CGGUGCUUU | GmUmCmGmGmUm | |
| | | | U | GmCmU*mU*mU*m | |
| | | | | U | |
| G022029 | 22 | AACACGAGGAAA | AACACGAGG | mA*mA*mC*ACGAG | chr6:31354795- |
| | | GCAAGUGU | AAAGCAAGU | GAAAGCAAGUGUG | 31354815 |
| | | | GUGUUUUAG | UUUUAGAmGmCmU | |
| | | | AGCUAGAAA | mAmGmAmAmAmU | |
| | | | UAGCAAGUU | mAmGmCAAGUUAA | |
| | | | AAAAUAAGG | AAUAAGGCUAGUC | |
| | | | CUAGUCCGU | CGUUAUCAmAmCm | |
| | | | UAUCAACUU | UmUmGmAmAmAm | |
| | | | GAAAAAGUG | AmAmGmUmGmGm | |
| | | | GCACCGAGU | CmAmCmCmGmAm | |
| | | | CGGUGCUUU | GmUmCmGmGmUm | |
| | | | U | GmCmU*mU*mU*m | |
| | | | | U | |
| G022030 | 23 | ACUUUACCUCCA | ACUUUACCU | mA*mC*mU*UUACC | chr6:31355803- |
| | | CUCAGAUC | CCACUCAGA | UCCACUCAGAUCG | 31355823 |
| | | | UCGUUUUAG | UUUUAGAmGmCmU | |
| | | | AGCUAGAAA | mAmGmAmAmAmU | |
| | | | UAGCAAGUU | mAmGmCAAGUUAA | |
| | | | AAAAUAAGG | AAUAAGGCUAGUC | |
| | | | CUAGUCCGU | CGUUAUCAmAmCm | |
| | | | UAUCAACUU | UmUmGmAmAmAm | |
| | | | GAAAAAGUG | AmAmGmUmGmGm | |
| | | | GCACCGAGU | CmAmCmCmGmAm | |
| | | | CGGUGCUUU | GmUmCmGmGmUm | |
| | | | U | GmCmU*mU*mU*m | |
| | | | | U | |
| G022031 | 24 | UCUGCUCCUGAU | UCUGCUCCU | mU*mC*mU*GCUCC | chr6:31356486- |
| | | CUGAGUGG | GAUCUGAGU | UGAUCUGAGUGGG | 31356506 |
| | | | GGGUUUUAG | UUUUAGAmGmCmU | |
| | | | AGCUAGAAA | mAmGmAmAmAmU | |
| | | | UAGCAAGUU | mAmGmCAAGUUAA | |
| | | | AAAAUAAGG | AAUAAGGCUAGUC | |
| | | | CUAGUCCGU | CGUUAUCAmAmCm | |
| | | | UAUCAACUU | UmUmGmAmAmAm | |
| | | | GAAAAAGUG | AmAmGmUmGmGm | |
| | | | GCACCGAGU | CmAmCmCmGmAm | |
| | | | CGGUGCUUU | GmUmCmGmGmUm | |
| | | | U | GmCmU*mU*mU*m | |
| | | | | U | |
| G022032 | 25 | AUCUCGGACCCG | AUCUCGGAC | mA*mU*mC*UCGGA | chr6:31354820- |
| | | GAGACUCG | CCGGAGACU | CCCGGAGACUCGG | 31354840 |
| | | | CGGUUUUAG | UUUUAGAmGmCmU | |
| | | | AGCUAGAAA | mAmGmAmAmAmU | |
| | | | UAGCAAGUU | mAmGmCAAGUUAA | |
| | | | AAAAUAAGG | AAUAAGGCUAGUC | |
| | | | CUAGUCCGU | CGUUAUCAmAmCm | |
| | | | UAUCAACUU | UmUmGmAmAmAm | |
| | | | GAAAAAGUG | AmAmGmUmGmGm | |
| | | | GCACCGAGU | CmAmCmCmGmAm | |
| | | | CGGUGCUUU | GmUmCmGmGmUm | |
| | | | | GmCmU*mU*mU*m | |
| | | | | U | |
| G022033 | 26 | CCUGGGGCUCUC | CCUGGGGCU | mC*mC*mU*GGGGC | chr6:31356545- |
| | | GCCGGUCG | CUCGCCGGU | UCUCGCCGGUCGG | 31356565 |
| | | | CGGUUUUAG | UUUUAGAmGmCmU | |
| | | | AGCUAGAAA | mAmGmAmAmAmU | |
| | | | UAGCAAGUU | mAmGmCAAGUUAA | |
| | | | AAAAUAAGG | AAUAAGGCUAGUC | |
| | | | CUAGUCCGU | CGUUAUCAmAmCm | |
| | | | UAUCAACUU | UmUmGmAmAmAm | |
| | | | GAAAAAGUG | AmAmGmUmGmGm | |
| | | | GCACCGAGU | CmAmCmCmGmAm | |
| | | | CGGUGCUUU | GmUmCmGmGmUm | |
| | | | U | GmCmU*mU*mU*m | |
| | | | | U | |
| G022034 | 27 | CUGGUCACAUGG | CUGGUCACA | mC*mU*mG*GUCAC | chr6:31356501- |
| | | GUGGUCCU | UGGGUGGUC | AUGGGUGGUCCUG | 31356521 |
| | | | CUGUUUUAG | UUUUAGAmGmCmU | |
| | | | AGCUAGAAA | mAmGmAmAmAmU | |
| | | | UAGCAAGUU | mAmGmCAAGUUAA | |
| | | | AAAAUAAGG | AAUAAGGCUAGUC | |
| | | | CUAGUCCGU | CGUUAUCAmAmCm | |
| | | | UAUCAACUU | UmUmGmAmAmAm | |
| | | | GAAAAAGUG | AmAmGmUmGmGm | |
| | | | GCACCGAGU | CmAmCmCmGmAm | |
| | | | CGGUGCUUU | GmUmCmGmGmUm | |
| | | | U | GmCmU*mU*mU*m | |
| | | | | U | |
| G022035 | 28 | CUCCUAUAGGUC | CUCCUAUAG | mC*mU*mC*CUAUA | chr6:31356116- |
| | | GCCGGGGA | GUCGCCGGG | GGUCGCCGGGGAG | 31356136 |
| | | | GAGUUUUAG | UUUUAGAmGmCmU | |
| | | | AGCUAGAAA | mAmGmAmAmAmU | |
| | | | UAGCAAGUU | mAmGmCAAGUUAA | |
| | | | AAAAUAAGG | AAUAAGGCUAGUC | |
| | | | CUAGUCCGU | CGUUAUCAmAmCm | |
| | | | UAUCAACUU | UmUmGmAmAmAm | |
| | | | GAAAAAGUG | AmAmGmUmGmGm | |
| | | | GCACCGAGU | CmAmCmCmGmAm | |
| | | | CGGUGCUUU | GmUmCmGmGmUm | |
| | | | U | GmCmU*mU*mU*m | |
| | | | | U | |
| G022036 | 29 | GUAAAGUGACUC | GUAAAGUGA | mG*mU*mA*AAGU | chr6:31355816- |
| | | AGAAGUGC | CUCAGAAGU | GACUCAGAAGUGC | 31355836 |
| | | | GCGUUUUAG | GUUUUAGAmGmCm | |
| | | | AGCUAGAAA | UmAmGmAmAmAm | |
| | | | UAGCAAGUU | UmAmGmCAAGUUA | |
| | | | AAAAUAAGG | AAAUAAGGCUAGU | |
| | | | CUAGUCCGU | CCGUUAUCAmAmC | |
| | | | UAUCAACUU | mUmUmGmAmAmA | |
| | | | GAAAAAGUG | mAmAmGmUmGmG | |
| | | | GCACCGAGU | mCmAmCmCmGmA | |
| | | | CGGUGCUUU | mGmUmCmGmGmU | |
| | | | U | mGmCmU*mU*mU* | |
| | | | | mU | |
| G022037 | 30 | ACACAGGGGCUA | ACACAGGGG | mA*mC*mA*CAGGG | chr6:31354983- |
| | | ACGCAGCC | CUAACGCAG | GCUAACGCAGCCG | 31355003 |
| | | | CCGUUUUAG | UUUUAGAmGmCmU | |
| | | | AGCUAGAAA | mAmGmAmAmAmU | |
| | | | UAGCAAGUU | mAmGmCAAGUUAA | |
| | | | AAAAUAAGG | AAUAAGGCUAGUC | |
| | | | CUAGUCCGU | CGUUAUCAmAmCm | |
| | | | UAUCAACUU | UmUmGmAmAmAm | |
| | | | GAAAAAGUG | AmAmGmUmGmGm | |
| | | | GCACCGAGU | CmAmCmCmGmAm | |
| | | | CGGUGCUUU | GmUmCmGmGmUm | |
| | | | U | GmCmU*mU*mU*m | |
| | | | | U | |
| G022038 | 31 | AUACUUCUGGAA | AUACUUCUG | mA*mU*mA*CUUCU | chr6:31354748- |
| | | AUUCCUUU | GAAAUUCCU | GGAAAUUCCUUUG | |
| | | | UUGUUUUAG | UUUUAGAmGmCmU | |
| | | | AGCUAGAAA | mAmGmAmAmAmU | |
| | | | UAGCAAGUU | mAmGmCAAGUUAA | |
| | | | AAAAUAAGG | AAUAAGGCUAGUC | |
| | | | CUAGUCCGU | CGUUAUCAmAmCm | |
| | | | UAUCAACUU | UmUmGmAmAmAm | 31354768 |
| | | | GAAAAAGUG | AmAmGmUmGmGm | |
| | | | GCACCGAGU | CmAmCmCmGmAm | |
| | | | CGGUGCUUU | GmUmCmGmGmUm | |
| | | | U | GmCmU*mU*mU*m | |
| | | | | U | |
| G022039 | 32 | GUCCUAGCAGUU | GUCCUAGCA | mG*mU*mC*CUAGC | chr6:31355150- |
| | | GUGGUCAU | GUUGUGGUC | AGUUGUGGUCAUG | 31355170 |
| | | | AUGUUUUAG | UUUUAGAmGmCmU | |
| | | | AGCUAGAAA | mAmGmAmAmAmU | |
| | | | UAGCAAGUU | mAmGmCAAGUUAA | |
| | | | AAAAUAAGG | AAUAAGGCUAGUC | |
| | | | CUAGUCCGU | CGUUAUCAmAmCm | |
| | | | UAUCAACUU | UmUmGmAmAmAm | |
| | | | GAAAAAGUG | AmAmGmUmGmGm | |
| | | | GCACCGAGU | CmAmCmCmGmAm | |
| | | | CGGUGCUUU | GmUmCmGmGmUm | |
| | | | U | GmCmU*mU*mU*m | |
| | | | | U | |
| G022040 | 33 | CCCAUCUCCUAU | CCCAUCUCC | mC*mC*mC*AUCUC | chr6:31356121- |
| | | AGGUCGCC | UAUAGGUCG | CUAUAGGUCGCCG | 31356141 |
| | | | CCGUUUUAG | UUUUAGAmGmCmU | |
| | | | AGCUAGAAA | mAmGmAmAmAmU | |
| | | | UAGCAAGUU | mAmGmCAAGUUAA | |
| | | | AAAAUAAGG | AAUAAGGCUAGUC | |
| | | | CUAGUCCGU | CGUUAUCAmAmCm | |
| | | | UAUCAACUU | UmUmGmAmAmAm | |
| | | | GAAAAAGUG | AmAmGmUmGmGm | |
| | | | GCACCGAGU | CmAmCmCmGmAm | |
| | | | CGGUGCUUU | GmUmCmGmGmUm | |
| | | | U | GmCmU*mU*mU*m | |
| | | | | U | |
| G022041 | 34 | CGACCUAUAGGA | CGACCUAUA | mC*mG*mA*CCUAU | chr6:31356123- |
| | | GAUGGGGA | GGAGAUGGG | AGGAGAUGGGGAG | 31356143 |
| | | | GAGUUUUAG | UUUUAGAmGmCmU | |
| | | | AGCUAGAAA | mAmGmAmAmAmU | |
| | | | UAGCAAGUU | mAmGmCAAGUUAA | |
| | | | AAAAUAAGG | AAUAAGGCUAGUC | |
| | | | CUAGUCCGU | CGUUAUCAmAmCm | |
| | | | UAUCAACUU | UmUmGmAmAmAm | |
| | | | GAAAAAGUG | AmAmGmUmGmGm | |
| | | | GCACCGAGU | CmAmCmCmGmAm | |
| | | | CGGUGCUUU | GmUmCmGmGmUm | |
| | | | U | GmCmU*mU*mU*m | |
| | | | | U | |
| G022042 | 35 | GAAGUAUGACUA | GAAGUAUGA | mG*mA*mA*GUAU | chr6:31354761- |
| | | CAGACCCA | CUACAGACC | GACUACAGACCCA | 31354781 |
| | | | CAGUUUUAG | GUUUUAGAmGmCm | |
| | | | AGCUAGAAA | UmAmGmAmAmAm | |
| | | | UAGCAAGUU | UmAmGmCAAGUUA | |
| | | | AAAAUAAGG | AAAUAAGGCUAGU | |
| | | | CUAGUCCGU | CCGUUAUCAmAmC | |
| | | | UAUCAACUU | mUmUmGmAmAmA | |
| | | | GAAAAAGUG | mAmAmGmUmGmG | |
| | | | GCACCGAGU | mCmAmCmCmGmA | |
| | | | CGGUGCUUU | mGmUmCmGmGmU | |
| | | | U | mGmCmU*mU*mU* | |
| | | | | mU | |
| G022043 | 36 | CUCCGAUGACCA | CUCCGAUGA | mC*mU*mC*CGAUG | chr6:31355145- |
| | | CAACUGCU | CCACAACUG | ACCACAACUGCUG | 31355165 |
| | | | CUGUUUUAG | UUUUAGAmGmCmU | |
| | | | AGCUAGAAA | mAmGmAmAmAmU | |
| | | | UAGCAAGUU | mAmGmCAAGUUAA | |
| | | | AAAAUAAGG | AAUAAGGCUAGUC | |
| | | | CUAGUCCGU | CGUUAUCAmAmCm | |
| | | | UAUCAACUU | UmUmGmAmAmAm | |
| | | | GAAAAAGUG | AmAmGmUmGmGm | |
| | | | GCACCGAGU | CmAmCmCmGmAm | |
| | | | CGGUGCUUU | GmUmCmGmGmUm | |
| | | | U | GmCmU*mU*mU*m | |
| | | | | U | |
| G022044 | 37 | AGUUGUGGUCAU | AGUUGUGGU | mA*mG*mU*UGUG | chr6:31355142- |
| | | CGGAGCUG | CAUCGGAGC | GUCAUCGGAGCUG | 31355162 |
| | | | UGGUUUUAG | GUUUUAGAmGmCm | |
| | | | AGCUAGAAA | UmAmGmAmAmAm | |
| | | | UAGCAAGUU | UmAmGmCAAGUUA | |
| | | | AAAAUAAGG | AAAUAAGGCUAGU | |
| | | | CUAGUCCGU | CCGUUAUCAmAmC | |
| | | | UAUCAACUU | mUmUmGmAmAmA | |
| | | | GAAAAAGUG | mAmAmGmUmGmG | |
| | | | GCACCGAGU | mCmAmCmCmGmA | |
| | | | CGGUGCUUU | mGmUmCmGmGmU | |
| | | | U | mGmCmU*mU*mU* | |
| | | | | mU | |
| G022045 | 38 | UACUUCUGGAAA | UACUUCUGG | mU*mA*mC*UUCUG | chr6:31354747- |
| | | UUCCUUUU | AAAUUCCUU | GAAAUUCCUUUUG | 31354767 |
| | | | UUGUUUUAG | UUUUAGAmGmCmU | |
| | | | AGCUAGAAA | mAmGmAmAmAmU | |
| | | | UAGCAAGUU | mAmGmCAAGUUAA | |
| | | | AAAAUAAGG | AAUAAGGCUAGUC | |
| | | | CUAGUCCGU | CGUUAUCAmAmCm | |
| | | | UAUCAACUU | UmUmGmAmAmAm | |
| | | | GAAAAAGUG | AmAmGmUmGmGm | |
| | | | GCACCGAGU | CmAmCmCmGmAm | |
| | | | CGGUGCUUU | GmUmCmGmGmUm | |
| | | | U | GmCmU*mU*mU*m | |
| | | | | U | |
| G022046 | 39 | CACAUGCCAUGU | CACAUGCCA | mC*mA*mC*AUGCC | chr6:31355349- |
| | | ACAGCAUG | UGUACAGCA | AUGUACAGCAUGG | 31355369 |
| | | | UGGUUUUAG | UUUUAGAmGmCmU | |
| | | | AGCUAGAAA | mAmGmAmAmAmU | |
| | | | UAGCAAGUU | mAmGmCAAGUUAA | |
| | | | AAAAUAAGG | AAUAAGGCUAGUC | |
| | | | CUAGUCCGU | CGUUAUCAmAmCm | |
| | | | UAUCAACUU | UmUmGmAmAmAm | |
| | | | GAAAAAGUG | AmAmGmUmGmGm | |
| | | | GCACCGAGU | CmAmCmCmGmAm | |
| | | | CGGUGCUUU | GmUmCmGmGmUm | |
| | | | U | GmCmU*mU*mU*m | |
| | | | | U | |
| G022047 | 40 | GGAGCGAGGGGA | GGAGCGAGG | mG*mG*mA*GCGA | chr6:31357027- |
| | | CCGCAGGC | GGACCGCAG | GGGGACCGCAGGC | 31357047 |
| | | | GCGUUUUAG | GUUUUAGAmGmCm | |
| | | | AGCUAGAAA | UmAmGmAmAmAm | |
| | | | UAGCAAGUU | UmAmGmCAAGUUA | |
| | | | AAAAUAAGG | AAAUAAGGCUAGU | |
| | | | CUAGUCCGU | CCGUUAUCAmAmC | |
| | | | UAUCAACUU | mUmUmGmAmAmA | |
| | | | GAAAAAGUG | mAmAmGmUmGmG | |
| | | | GCACCGAGU | mCmAmCmCmGmA | |
| | | | CGGUGCUUU | mGmUmCmGmGmU | |
| | | | U | mGmCmU*mU*mU* | |
| | | | | mU | |
| G022048 | 41 | AGGAAAAGUCAC | AGGAAAAGU | mA*mG*mG*AAAA | chr6:31355888- |
| | | GGUUCCCA | CACGGUUCC | GUCACGGUUCCCA | 31355908 |
| | | | CAGUUUUAG | GUUUUAGAmGmCm | |
| | | | AGCUAGAAA | UmAmGmAmAmAm | |
| | | | UAGCAAGUU | UmAmGmCAAGUUA | |
| | | | AAAAUAAGG | AAAUAAGGCUAGU | |
| | | | CUAGUCCGU | CCGUUAUCAmAmC | |
| | | | UAUCAACUU | mUmUmGmAmAmA | |
| | | | GAAAAAGUG | mAmAmGmUmGmG | |
| | | | GCACCGAGU | mCmAmCmCmGmA | |
| | | | CGGUGCUUU | mGmUmCmGmGmU | |
| | | | U | mGmCmU*mU*mU* | |
| | | | | mU | |
| G022049 | 42 | GAGCCUUCCCCA | GAGCCUUCC | mG*mA*mG*CCUUC | chr6:31356129- |
| | | UCUCCUAU | CCAUCUCCU | CCCAUCUCCUAUG | 31356149 |
| | | | AUGUUUUAG | UUUUAGAmGmCmU | |
| | | | AGCUAGAAA | mAmGmAmAmAmU | |
| | | | UAGCAAGUU | mAmGmCAAGUUAA | |
| | | | AAAAUAAGG | AAUAAGGCUAGUC | |
| | | | CUAGUCCGU | CGUUAUCAmAmCm | |
| | | | UAUCAACUU | UmUmGmAmAmAm | |
| | | | GAAAAAGUG | AmAmGmUmGmGm | |
| | | | GCACCGAGU | CmAmCmCmGmAm | |
| | | | CGGUGCUUU | GmUmCmGmGmUm | |
| | | | U | GmCmU*mU*mU*m | |
| | | | | U | |
| G022050 | 43 | GACUCCCCAUCC | GACUCCCCA | mG*mA*mC*UCCCC | chr6:31356636- |
| | | CCCACGUA | UCCCCCACG | AUCCCCCACGUAG | 31356656 |
| | | | UAGUUUUAG | UUUUAGAmGmCmU | |
| | | | AGCUAGAAA | mAmGmAmAmAmU | |
| | | | UAGCAAGUU | mAmGmCAAGUUAA | |
| | | | AAAAUAAGG | AAUAAGGCUAGUC | |
| | | | CUAGUCCGU | CGUUAUCAmAmCm | |
| | | | UAUCAACUU | UmUmGmAmAmAm | |
| | | | GAAAAAGUG | AmAmGmUmGmGm | |
| | | | GCACCGAGU | CmAmCmCmGmAm | |
| | | | CGGUGCUUU | GmUmCmGmGmUm | |
| | | | U | GmCmU*mU*mU*m | |
| | | | | U | |
| G022051 | 44 | CCCGGCGACCUA | CCCGGCGAC | mC*mC*mC*GGCGA | chr6:31356118- |
| | | UAGGAGAU | CUAUAGGAG | CCUAUAGGAGAUG | 31356138 |
| | | | AUGUUUUAG | UUUUAGAmGmCmU | |
| | | | AGCUAGAAA | mAmGmAmAmAmU | |
| | | | UAGCAAGUU | mAmGmCAAGUUAA | |
| | | | AAAAUAAGG | AAUAAGGCUAGUC | |
| | | | CUAGUCCGU | CGUUAUCAmAmCm | |
| | | | UAUCAACUU | UmUmGmAmAmAm | |
| | | | GAAAAAGUG | AmAmGmUmGmGm | |
| | | | GCACCGAGU | CmAmCmCmGmAm | |
| | | | CGGUGCUUU | GmUmCmGmGmUm | |
| | | | U | GmCmU*mU*mU*m | |
| | | | | U | |
| G022052 | 45 | ACGGUUCCCAAG | ACGGUUCCC | mA*mC*mG*GUUCC | chr6:31355898- |
| | | GCUGCUGC | AAGGCUGCU | CAAGGCUGCUGCG | 31355918 |
| | | | GCGUUUUAG | UUUUAGAmGmCmU | |
| | | | AGCUAGAAA | mAmGmAmAmAmU | |
| | | | UAGCAAGUU | mAmGmCAAGUUAA | |
| | | | AAAAUAAGG | AAUAAGGCUAGUC | |
| | | | CUAGUCCGU | CGUUAUCAmAmCm | |
| | | | UAUCAACUU | UmUmGmAmAmAm | |
| | | | GAAAAAGUG | AmAmGmUmGmGm | |
| | | | GCACCGAGU | CmAmCmCmGmAm | |
| | | | CGGUGCUUU | GmUmCmGmGmUm | |
| | | | U | GmCmU*mU*mU*m | |
| | | | | U | |
| G022053 | 46 | GGGAGUCGUGAC | GGGAGUCGU | mG*mG*mG*AGUC | chr6:31356649- |
| | | CUGCGCCC | GACCUGCGC | GUGACCUGCGCCC | 31356669 |
| | | | CCGUUUUAG | GUUUUAGAmGmCm | |
| | | | AGCUAGAAA | UmAmGmAmAmAm | |
| | | | UAGCAAGUU | UmAmGmCAAGUUA | |
| | | | AAAAUAAGG | AAAUAAGGCUAGU | |
| | | | CUAGUCCGU | CCGUUAUCAmAmC | |
| | | | UAUCAACUU | mUmUmGmAmAmA | |
| | | | GAAAAAGUG | mAmAmGmUmGmG | |
| | | | GCACCGAGU | mCmAmCmCmGmA | |
| | | | CGGUGCUUU | mGmUmCmGmGmU | |
| | | | U | mGmCmU*mU*mU* | |
| | | | | mU | |
| G022054 | 47 | GAGCGAGGGGAC | GAGCGAGGG | mG*mA*mG*CGAG | chr6:31357026- |
| | | CGCAGGCG | GACCGCAGG | GGGACCGCAGGCG | 31357046 |
| | | | CGGUUUUAG | GUUUUAGAmGmCm | |
| | | | AGCUAGAAA | UmAmGmAmAmAm | |
| | | | UAGCAAGUU | UmAmGmCAAGUUA | |
| | | | AAAAUAAGG | AAAUAAGGCUAGU | |
| | | | CUAGUCCGU | CCGUUAUCAmAmC | |
| | | | UAUCAACUU | mUmUmGmAmAmA | |
| | | | GAAAAAGUG | mAmAmGmUmGmG | |
| | | | GCACCGAGU | mCmAmCmCmGmA | |
| | | | CGGUGCUUU | mGmUmCmGmGmU | |
| | | | U | mGmCmU*mU*mU* | |
| | | | | mU | |
| G022055 | 48 | CCUGGCUGUCCU | CCUGGCUGU | mC*mC*mU*GGCUG | chr6:31355157- |
| | | AGCAGUUG | CCUAGCAGU | UCCUAGCAGUUGG | 31355177 |
| | | | UGGUUUUAG | UUUUAGAmGmCmU | |
| | | | AGCUAGAAA | mAmGmAmAmAmU | |
| | | | UAGCAAGUU | mAmGmCAAGUUAA | |
| | | | AAAAUAAGG | AAUAAGGCUAGUC | |
| | | | CUAGUCCGU | CGUUAUCAmAmCm | |
| | | | UAUCAACUU | UmUmGmAmAmAm | |
| | | | GAAAAAGUG | AmAmGmUmGmGm | |
| | | | GCACCGAGU | CmAmCmCmGmAm | |
| | | | CGGUGCUUU | GmUmCmGmGmUm | |
| | | | U | GmCmU*mU*mU*m | |
| | | | | U | |
| G027488 | 49 | ACAUGCCAUGUA | ACAUGCCAU | mA*mC*mA*UGCCA | chr6:31355348- |
| | | CAGCAUGA | GUACAGCAU | UGUACAGCAUGAG | 31355368 |
| | | | GAGUUUUAG | UUUUAGAmGmCmU | |
| | | | AGCUAGAAA | mAmGmAmAmAmU | |
| | | | UAGCAAGUU | mAmGmCAAGUUAA | |
| | | | AAAAUAAGG | AAUAAGGCUAGUC | |
| | | | CUAGUCCGU | CGUUAUCACGAAA | |
| | | | UAUCACGAA | GGGCACCGAGUCG | |
| | | | AGGGCACCG | GmU*mG*mC*mU | |
| | | | AGUCGGUGC | | |
| | | | U | | |
| G027489 | 50 | AACAAUGCCCAC | AACAAUGCC | mA*mA*mC*AAUGC | chr6:31355182- |
| | | GAUGGGGA | CACGAUGGG | CCACGAUGGGGAG | 31355202 |
| | | | GAGUUUUAG | UUUUAGAmGmCmU | |
| | | | AGCUAGAAA | mAmGmAmAmAmU | |
| | | | UAGCAAGUU | mAmGmCAAGUUAA | |
| | | | AAAAUAAGG | AAUAAGGCUAGUC | |
| | | | CUAGUCCGU | CGUUAUCACGAAA | |
| | | | UAUCACGAA | GGGCACCGAGUCG | |
| | | | AGGGCACCG | GmU*mG*mC*mU | |
| | | | AGUCGGUGC | | |
| | | | U | | |
| G027490 | 51 | CUCCGAUGACCA | CUCCGAUGA | mC*mU*mC*CGAUG | chr6:31355145- |
| | | CAACUGCU | CCACAACUG | ACCACAACUGCUG | 31355165 |
| | | | CUGUUUUAG | UUUUAGAmGmCmU | |
| | | | AGCUAGAAA | mAmGmAmAmAmU | |
| | | | UAGCAAGUU | mAmGmCAAGUUAA | |
| | | | AAAAUAAGG | AAUAAGGCUAGUC | |
| | | | CUAGUCCGU | CGUUAUCACGAAA | |
| | | | UAUCACGAA | GGGCACCGAGUCG | |
| | | | AGGGCACCG | GmU*mG*mC*mU | |
| | | | AGUCGGUGC | | |
| | | | U | | |
| G027491 | 52 | CACAUGCCAUGU | CACAUGCCA | mC*mA*mC*AUGCC | chr6:31355349- |
| | | ACAGCAUG | UGUACAGCA | AUGUACAGCAUGG | 31355369 |
| | | | UGGUUUUAG | UUUUAGAmGmCmU | |
| | | | AGCUAGAAA | mAmGmAmAmAmU | |
| | | | UAGCAAGUU | mAmGmCAAGUUAA | |
| | | | AAAAUAAGG | AAUAAGGCUAGUC | |
| | | | CUAGUCCGU | CGUUAUCACGAAA | |
| | | | UAUCACGAA | GGGCACCGAGUCG | |
| | | | AGGGCACCG | GmU*mG*mC*mU | |
| | | | AGUCGGUGC | | |
| | | | U | | |
| G027973 | 53 | CCGGACGGGCGC | CCGGACGGG | mC*mC*mG*GACGG | chr6:31356381- |
| | | CUCCUCCG | CGCCUCCUC | GCGCCUCCUCCGG | 31356401 |
| | | | CGGUUUUAG | UUUUAGAmGmCmU | |
| | | | AGCUAGAAA | mAmGmAmAmAmU | |
| | | | UAGCAAGUU | mAmGmCAAGUUAA | |
| | | | AAAAUAAGG | AAUAAGGCUAGUC | |
| | | | CUAGUCCGU | CGUUAUCACGAAA | |
| | | | UAUCACGAA | GGGCACCGAGUCG | |
| | | | AGGGCACCG | GmU*mG*mC*mU | |
| | | | AGUCGGUGC | | |
| | | | U | | |
| G027974 | 54 | CGGACGGGCGCC | CGGACGGGC | mC*mG*mG*ACGGG | chr6:31356380- |
| | | UCCUCCGC | GCCUCCUCC | CGCCUCCUCCGCG | 31356400 |
| | | | GCGUUUUAG | UUUUAGAmGmCmU | |
| | | | AGCUAGAAA | mAmGmAmAmAmU | |
| | | | UAGCAAGUU | mAmGmCAAGUUAA | |
| | | | AAAAUAAGG | AAUAAGGCUAGUC | |
| | | | CUAGUCCGU | CGUUAUCACGAAA | |
| | | | UAUCACGAA | GGGCACCGAGUCG | |
| | | | AGGGCACCG | GmU*mG*mC*mU | |
| | | | AGUCGGUGC | | |
| | | | U | | |
| G027975 | 55 | GAGCCGUCUUCC | GUGGACUGG | mG*mU*mG*GACU | chr6:31355204- |
| | | CAGUCCAC | GAAGACGGC | GGGAAGACGGCUC | 31355224 |
| | | | UCGUUUUAG | GUUUUAGAmGmCm | |
| | | | AGCUAGAAA | UmAmGmAmAmAm | |
| | | | UAGCAAGUU | UmAmGmCAAGUUA | |
| | | | AAAAUAAGG | AAAUAAGGCUAGU | |
| | | | CUAGUCCGU | CCGUUAUCACGAA | |
| | | | UAUCACGAA | AGGGCACCGAGUC | |
| | | | AGGGCACCG | GGmU*mG*mC*mU | |
| | | | AGUCGGUGC | | |
| | | | U | | |
| G027976 | 56 | AGAGCCGUCUUC | UGGACUGGG | mU*mG*mG*ACUG | chr6:31355205- |
| | | CCAGUCCA | AAGACGGCU | GGAAGACGGCUCU | 31355225 |
| | | | CUGUUUUAG | GUUUUAGAmGmCm | |
| | | | AGCUAGAAA | UmAmGmAmAmAm | |
| | | | UAGCAAGUU | UmAmGmCAAGUUA | |
| | | | AAAAUAAGG | AAAUAAGGCUAGU | |
| | | | CUAGUCCGU | CCGUUAUCACGAA | |
| | | | UAUCACGAA | AGGGCACCGAGUC | |
| | | | AGGGCACCG | GGmU*mG*mC*mU | |
| | | | AGUCGGUGC | | |
| | | | U | | |
| G027977 | 57 | GUACGGCUGCGA | GUACGGCUG | mG*mU*mA*CGGCU | chr6:31356400- |
| | | CGUGGGGC | CGACGUGGG | GCGACGUGGGGCG | 31356420 |
| | | | GCGUUUUAG | UUUUAGAmGmCmU | |
| | | | AGCUAGAAA | mAmGmAmAmAmU | |
| | | | UAGCAAGUU | mAmGmCAAGUUAA | |
| | | | AAAAUAAGG | AAUAAGGCUAGUC | |
| | | | CUAGUCCGU | CGUUAUCACGAAA | |
| | | | UAUCACGAA | GGGCACCGAGUCG | |
| | | | AGGGCACCG | GmU*mG*mC*mU | |
| | | | AGUCGGUGC | | |
| | | | U | | |
| G027978 | 58 | CCGUCCCCAUCG | AAUGCCCAC | mA*mA*mU*GCCCA | chr6:31355185- |
| | | UGGGCAUU | GAUGGGGAC | CGAUGGGGACGGG | 31355205 |
| | | | GGGUUUUAG | UUUUAGAmGmCmU | |
| | | | AGCUAGAAA | mAmGmAmAmAmU | |
| | | | UAGCAAGUU | mAmGmCAAGUUAA | |
| | | | AAAAUAAGG | AAUAAGGCUAGUC | |
| | | | CUAGUCCGU | CGUUAUCACGAAA | |
| | | | UAUCACGAA | GGGCACCGAGUCG | |
| | | | AGGGCACCG | GmU*mG*mC*mU | |
| | | | AGUCGGUGC | | |
| | | | U | | |
| G027979 | 59 | UCGCUGCUGUGA | UCGCUGCUG | mU*mC*mG*CUGCU | chr6:31355119- |
| | | UGUGUAGG | UGAUGUGUA | GUGAUGUGUAGGG | 31355139 |
| | | | GGGUUUUAG | UUUUAGAmGmCmU | |
| | | | AGCUAGAAA | mAmGmAmAmAmU | |
| | | | UAGCAAGUU | mAmGmCAAGUUAA | |
| | | | AAAAUAAGG | AAUAAGGCUAGUC | |
| | | | CUAGUCCGU | CGUUAUCACGAAA | |
| | | | UAUCACGAA | GGGCACCGAGUCG | |
| | | | AGGGCACCG | GmU*mG*mC*mU | |
| | | | AGUCGGUGC | | |
| | | | U | | |
| G027980 | 60 | UGGUCGCUGCUG | UGGUCGCUG | mU*mG*mG*UCGCU | chr6:31355122- |
| | | UGAUGUGU | CUGUGAUGU | GCUGUGAUGUGUG | 31355142 |
| | | | GUGUUUUAG | UUUUAGAmGmCmU | |
| | | | AGCUAGAAA | mAmGmAmAmAmU | |
| | | | UAGCAAGUU | mAmGmCAAGUUAA | |
| | | | AAAAUAAGG | AAUAAGGCUAGUC | |
| | | | CUAGUCCGU | CGUUAUCACGAAA | |
| | | | UAUCACGAA | GGGCACCGAGUCG | |
| | | | AGGGCACCG | GmU*mG*mC*mU | |
| | | | AGUCGGUGC | | |
| | | | U | | |
| G027981 | 61 | CCAGGCAGCGAC | CCAGGCAGC | mC*mC*mA*GGCAG | chr6:31354510- |
| | | AGUGCCCA | GACAGUGCC | CGACAGUGCCCAG | 31354530 |
| | | | CAGUUUUAG | UUUUAGAmGmCmU | |
| | | | AGCUAGAAA | mAmGmAmAmAmU | |
| | | | UAGCAAGUU | mAmGmCAAGUUAA | |
| | | | AAAAUAAGG | AAUAAGGCUAGUC | |
| | | | CUAGUCCGU | CGUUAUCACGAAA | |
| | | | UAUCACGAA | GGGCACCGAGUCG | |
| | | | AGGGCACCG | GmU*mG*mC*mU | |
| | | | AGUCGGUGC | | |
| | | | U | | |
| G027982 | 62 | GGCAGCGACAGU | CCCUGGGCA | mC*mC*mC*UGGGC | chr6:31354507- |
| | | GCCCAGGG | CUGUCGCUG | ACUGUCGCUGCCG | 31354527 |
| | | | CCGUUUUAG | UUUUAGAmGmCmU | |
| | | | AGCUAGAAA | mAmGmAmAmAmU | |
| | | | UAGCAAGUU | mAmGmCAAGUUAA | |
| | | | AAAAUAAGG | AAUAAGGCUAGUC | |
| | | | CUAGUCCGU | CGUUAUCACGAAA | |
| | | | UAUCACGAA | GGGCACCGAGUCG | |
| | | | AGGGCACCG | GmU*mG*mC*mU | |
| | | | AGUCGGUGC | | |
| | | | U | | |
| G027983 | 63 | UCCAGGCAGCGA | UCCAGGCAG | mU*mC*mC*AGGCA | chr6:31354511- |
| | | CAGUGCCC | CGACAGUGC | GCGACAGUGCCCG | 31354531 |
| | | | CCGUUUUAG | UUUUAGAmGmCmU | |
| | | | AGCUAGAAA | mAmGmAmAmAmU | |
| | | | UAGCAAGUU | mAmGmCAAGUUAA | |
| | | | AAAAUAAGG | AAUAAGGCUAGUC | |
| | | | CUAGUCCGU | CGUUAUCACGAAA | |
| | | | UAUCACGAA | GGGCACCGAGUCG | |
| | | | AGGGCACCG | GmU*mG*mC*mU | |
| | | | AGUCGGUGC | | |
| | | | U | | |
| G027984 | 64 | AGUCCACCGUCC | CACGAUGGG | mC*mA*mC*GAUGG | chr6:31355191- |
| | | CCAUCGUG | GACGGUGGA | GGACGGUGGACUG | 31355211 |
| | | | CUGUUUUAG | UUUUAGAmGmCmU | |
| | | | AGCUAGAAA | mAmGmAmAmAmU | |
| | | | UAGCAAGUU | mAmGmCAAGUUAA | |
| | | | AAAAUAAGG | AAUAAGGCUAGUC | |
| | | | CUAGUCCGU | CGUUAUCACGAAA | |
| | | | UAUCACGAA | GGGCACCGAGUCG | |
| | | | AGGGCACCG | GmU*mG*mC*mU | |
| | | | AGUCGGUGC | | |
| | | | U | | |
| G027985 | 65 | CAGUCCACCGUC | CAGUCCACC | mC*mA*mG*UCCAC | chr6:31355192- |
| | | CCCAUCGU | GUCCCCAUC | CGUCCCCAUCGUG | 31355212 |
| | | | GUGUUUUAG | UUUUAGAmGmCmU | |
| | | | AGCUAGAAA | mAmGmAmAmAmU | |
| | | | UAGCAAGUU | mAmGmCAAGUUAA | |
| | | | AAAAUAAGG | AAUAAGGCUAGUC | |
| | | | CUAGUCCGU | CGUUAUCACGAAA | |
| | | | UAUCACGAA | GGGCACCGAGUCG | |
| | | | AGGGCACCG | GmU*mG*mC*mU | |
| | | | AGUCGGUGC | | |
| | | | U | | |
| G027986 | 66 | GUCCACCGUCCC | CCACGAUGG | mC*mC*mA*CGAUG | chr6:31355190- |
| | | CAUCGUGG | GGACGGUGG | GGGACGGUGGACG | 31355210 |
| | | | ACGUUUUAG | UUUUAGAmGmCmU | |
| | | | AGCUAGAAA | mAmGmAmAmAmU | |
| | | | UAGCAAGUU | mAmGmCAAGUUAA | |
| | | | AAAAUAAGG | AAUAAGGCUAGUC | |
| | | | CUAGUCCGU | CGUUAUCACGAAA | |
| | | | UAUCACGAA | GGGCACCGAGUCG | |
| | | | AGGGCACCG | GmU*mG*mC*mU | |
| | | | AGUCGGUGC | | |
| | | | U | | |
| G027987 | 67 | CCAGUCCACCGU | CCAGUCCAC | mC*mC*mA*GUCCA | chr6:31355193- |
| | | CCCCAUCG | CGUCCCCAU | CCGUCCCCAUCGG | 31355213 |
| | | | CGGUUUUAG | UUUUAGAmGmCmU | |
| | | | AGCUAGAAA | mAmGmAmAmAmU | |
| | | | UAGCAAGUU | mAmGmCAAGUUAA | |
| | | | AAAAUAAGG | AAUAAGGCUAGUC | |
| | | | CUAGUCCGU | CGUUAUCACGAAA | |
| | | | UAUCACGAA | GGGCACCGAGUCG | |
| | | | AGGGCACCG | GmU*mG*mC*mU | |
| | | | AGUCGGUGC | | |
| | | | U | | |
| G027988 | 68 | UCUUCCCAGUCC | GGGACGGUG | mG*mG*mG*ACGG | chr6:31355198- |
| | | ACCGUCCC | GACUGGGAA | UGGACUGGGAAGA | 31355218 |
| | | | GAGUUUUAG | GUUUUAGAmGmCm | |
| | | | AGCUAGAAA | UmAmGmAmAmAm | |
| | | | UAGCAAGUU | UmAmGmCAAGUUA | |
| | | | AAAAUAAGG | AAAUAAGGCUAGU | |
| | | | CUAGUCCGU | CCGUUAUCACGAA | |
| | | | UAUCACGAA | AGGGCACCGAGUC | |
| | | | AGGGCACCG | GGmU*mG*mC*mU | |
| | | | AGUCGGUGC | | |
| | | | U | | |
| G027989 | 69 | CGAAGCCCCUCA | CGAAGCCCC | mC*mG*mA*AGCCC | chr6:31355320- |
| | | CCCUGAGA | UCACCCUGA | CUCACCCUGAGAG | 31355340 |
| | | | GAGUUUUAG | UUUUAGAmGmCmU | |
| | | | AGCUAGAAA | mAmGmAmAmAmU | |
| | | | UAGCAAGUU | mAmGmCAAGUUAA | |
| | | | AAAAUAAGG | AAUAAGGCUAGUC | |
| | | | CUAGUCCGU | CGUUAUCACGAAA | |
| | | | UAUCACGAA | GGGCACCGAGUCG | |
| | | | AGGGCACCG | GmU*mG*mC*mU | |
| | | | AGUCGGUGC | | |
| | | | U | | |
| G027990 | 70 | GAAGCCCCUCAC | GAAGCCCCU | mG*mA*mA*GCCCC | chr6:31355319- |
| | | CCUGAGAU | CACCCUGAG | UCACCCUGAGAUG | 31355339 |
| | | | AUGUUUUAG | UUUUAGAmGmCmU | |
| | | | AGCUAGAAA | mAmGmAmAmAmU | |
| | | | UAGCAAGUU | mAmGmCAAGUUAA | |
| | | | AAAAUAAGG | AAUAAGGCUAGUC | |
| | | | CUAGUCCGU | CGUUAUCACGAAA | |
| | | | UAUCACGAA | GGGCACCGAGUCG | |
| | | | AGGGCACCG | GmU*mG*mC*mU | |
| | | | AGUCGGUGC | | |
| | | | U | | |
| G027991 | 71 | UCCCCAUCGUGG | AACAAUGCC | mA*mA*mC*AAUGC | chr6:31355182- |
| | | GCAUUGUU | CACGAUGGG | CCACGAUGGGGAG | 31355202 |
| | | | GAGUUUUAG | UUUUAGAmGmCmU | |
| | | | AGCUAGAAA | mAmGmAmAmAmU | |
| | | | UAGCAAGUU | mAmGmCAAGUUAA | |
| | | | AAAAUAAGG | AAUAAGGCUAGUC | |
| | | | CUAGUCCGU | CGUUAUCACGAAA | |
| | | | UAUCACGAA | GGGCACCGAGUCG | |
| | | | AGGGCACCG | GmU*mG*mC*mU | |
| | | | AGUCGGUGC | | |
| | | | U | | |
| G027992 | 72 | AGUUGUGGUCAU | AGUUGUGGU | mA*mG*mU*UGUG | chr6:31355142- |
| | | CGGAGCUG | CAUCGGAGC | GUCAUCGGAGCUG | 31355162 |
| | | | UGGUUUUAG | GUUUUAGAmGmCm | |
| | | | AGCUAGAAA | UmAmGmAmAmAm | |
| | | | UAGCAAGUU | UmAmGmCAAGUUA | |
| | | | AAAAUAAGG | AAAUAAGGCUAGU | |
| | | | CUAGUCCGU | CCGUUAUCACGAA | |
| | | | UAUCACGAA | AGGGCACCGAGUC | |
| | | | AGGGCACCG | GGmU*mG*mC*mU | |
| | | | AGUCGGUGC | | |
| | | | U | | |
| G027993 | 73 | CAUCGUGGGCAU | CAGCAACAA | mC*mA*mG*CAACA | chr6:31355178- |
| | | UGUUGCUG | UGCCCACGA | AUGCCCACGAUGG | 31355198 |
| | | | UGGUUUUAG | UUUUAGAmGmCmU | |
| | | | AGCUAGAAA | mAmGmAmAmAmU | |
| | | | UAGCAAGUU | mAmGmCAAGUUAA | |
| | | | AAAAUAAGG | AAUAAGGCUAGUC | |
| | | | CUAGUCCGU | CGUUAUCACGAAA | |
| | | | UAUCACGAA | GGGCACCGAGUCG | |
| | | | AGGGCACCG | GmU*mG*mC*mU | |
| | | | AGUCGGUGC | | |
| | | | U | | |
| G027994 | 74 | CAUGCCAUGUAC | CAUGCCAUG | mC*mA*mU*GCCAU | chr6:31355347- |
| | | AGCAUGAG | UACAGCAUG | GUACAGCAUGAGG | 31355367 |
| | | | AGGUUUUAG | UUUUAGAmGmCmU | |
| | | | AGCUAGAAA | mAmGmAmAmAmU | |
| | | | UAGCAAGUU | mAmGmCAAGUUAA | |
| | | | AAAAUAAGG | AAUAAGGCUAGUC | |
| | | | CUAGUCCGU | CGUUAUCACGAAA | |
| | | | UAUCACGAA | GGGCACCGAGUCG | |
| | | | AGGGCACCG | GmU*mG*mC*mU | |
| | | | AGUCGGUGC | | |
| | | | U | | |
| G027995 | 75 | GGCUGUCCUAGC | CCACAACUG | mC*mC*mA*CAACU | chr6:31355154- |
| | | AGUUGUGG | CUAGGACAG | GCUAGGACAGCCG | 31355174 |
| | | | CCGUUUUAG | UUUUAGAmGmCmU | |
| | | | AGCUAGAAA | mAmGmAmAmAmU | |
| | | | UAGCAAGUU | mAmGmCAAGUUAA | |
| | | | AAAAUAAGG | AAUAAGGCUAGUC | |
| | | | CUAGUCCGU | CGUUAUCACGAAA | |
| | | | UAUCACGAA | GGGCACCGAGUCG | |
| | | | AGGGCACCG | GmU*mG*mC*mU | |
| | | | AGUCGGUGC | | |
| | | | U | | |
| G027996 | 76 | AUCGUGGGCAUU | CCAGCAACA | mC*mC*mA*GCAAC | chr6:31355177- |
| | | GUUGCUGG | AUGCCCACG | AAUGCCCACGAUG | 31355197 |
| | | | AUGUUUUAG | UUUUAGAmGmCmU | |
| | | | AGCUAGAAA | mAmGmAmAmAmU | |
| | | | UAGCAAGUU | mAmGmCAAGUUAA | |
| | | | AAAAUAAGG | AAUAAGGCUAGUC | |
| | | | CUAGUCCGU | CGUUAUCACGAAA | |
| | | | UAUCACGAA | GGGCACCGAGUCG | |
| | | | AGGGCACCG | GmU*mG*mC*mU | |
| | | | AGUCGGUGC | | |
| | | | U | | |
| G027997 | 77 | CCCAUCGUGGGC | CCCAUCGUG | mC*mC*mC*AUCGU | chr6:31355180- |
| | | AUUGUUGC | GGCAUUGUU | GGGCAUUGUUGCG | 31355200 |
| | | | GCGUUUUAG | UUUUAGAmGmCmU | |
| | | | AGCUAGAAA | mAmGmAmAmAmU | |
| | | | UAGCAAGUU | mAmGmCAAGUUAA | |
| | | | AAAAUAAGG | AAUAAGGCUAGUC | |
| | | | CUAGUCCGU | CGUUAUCACGAAA | |
| | | | UAUCACGAA | GGGCACCGAGUCG | |
| | | | AGGGCACCG | GmU*mG*mC*mU | |
| | | | AGUCGGUGC | | |
| | | | U | | |
| G027998 | 78 | CCUGGCUGUCCU | CCUGGCUGU | mC*mC*mU*GGCUG | chr6:31355157- |
| | | AGCAGUUG | CCUAGCAGU | UCCUAGCAGUUGG | 31355177 |
| | | | UGGUUUUAG | UUUUAGAmGmCmU | |
| | | | AGCUAGAAA | mAmGmAmAmAmU | |
| | | | UAGCAAGUU | mAmGmCAAGUUAA | |
| | | | AAAAUAAGG | AAUAAGGCUAGUC | |
| | | | CUAGUCCGU | CGUUAUCACGAAA | |
| | | | UAUCACGAA | GGGCACCGAGUCG | |
| | | | AGGGCACCG | GmU*mG*mC*mU | |
| | | | AGUCGGUGC | | |
| | | | U | | |
| G027999 | 79 | CGUGGGCAUUGU | CGUGGGCAU | mC*mG*mU*GGGCA | chr6:31355175- |
| | | UGCUGGCC | UGUUGCUGG | UUGUUGCUGGCCG | 31355195 |
| | | | CCGUUUUAG | UUUUAGAmGmCmU | |
| | | | AGCUAGAAA | mAmGmAmAmAmU | |
| | | | UAGCAAGUU | mAmGmCAAGUUAA | |
| | | | AAAAUAAGG | AAUAAGGCUAGUC | |
| | | | CUAGUCCGU | CGUUAUCACGAAA | |
| | | | UAUCACGAA | GGGCACCGAGUCG | |
| | | | AGGGCACCG | GmU*mG*mC*mU | |
| | | | AGUCGGUGC | | |
| | | | U | | |
| G028000 | 80 | AGCAGUUGUGGU | CUCCGAUGA | mC*mU*mC*CGAUG | chr6:31355145- |
| | | CAUCGGAG | CCACAACUG | ACCACAACUGCUG | 31355165 |
| | | | CUGUUUUAG | UUUUAGAmGmCmU | |
| | | | AGCUAGAAA | mAmGmAmAmAmU | |
| | | | UAGCAAGUU | mAmGmCAAGUUAA | |
| | | | AAAAUAAGG | AAUAAGGCUAGUC | |
| | | | CUAGUCCGU | CGUUAUCACGAAA | |
| | | | UAUCACGAA | GGGCACCGAGUCG | |
| | | | AGGGCACCG | GmU*mG*mC*mU | |
| | | | AGUCGGUGC | | |
| | | | U | | |
| G028001 | 81 | CUUGUGGAGACC | CUUGUGGAG | mC*mU*mU*GUGG | chr6:31355432- |
| | | AGACCAGC | ACCAGACCA | AGACCAGACCAGC | 31355452 |
| | | | GCGUUUUAG | GUUUUAGAmGmCm | |
| | | | AGCUAGAAA | UmAmGmAmAmAm | |
| | | | UAGCAAGUU | UmAmGmCAAGUUA | |
| | | | AAAAUAAGG | AAAUAAGGCUAGU | |
| | | | CUAGUCCGU | CCGUUAUCACGAA | |
| | | | UAUCACGAA | AGGGCACCGAGUC | |
| | | | AGGGCACCG | GGmU*mG*mC*mU | |
| | | | AGUCGGUGC | | |
| | | | U | | |
| G028002 | 82 | UGUACAGCAUGA | GCAGCCCCU | mG*mC*mA*GCCCC | chr6:31355340- |
| | | GGGGCUGC | CAUGCUGUA | UCAUGCUGUACAG | 31355360 |
| | | | CAGUUUUAG | UUUUAGAmGmCmU | |
| | | | AGCUAGAAA | mAmGmAmAmAmU | |
| | | | UAGCAAGUU | mAmGmCAAGUUAA | |
| | | | AAAAUAAGG | AAUAAGGCUAGUC | |
| | | | CUAGUCCGU | CGUUAUCACGAAA | |
| | | | UAUCACGAA | GGGCACCGAGUCG | |
| | | | AGGGCACCG | GmU*mG*mC*mU | |
| | | | AGUCGGUGC | | |
| | | | U | | |
| G028003 | 83 | UCGUGGGCAUUG | GCCAGCAAC | mG*mC*mC*AGCAA | chr6:31355176- |
| | | UUGCUGGC | AAUGCCCAC | CAAUGCCCACGAG | 31355196 |
| | | | GAGUUUUAG | UUUUAGAmGmCmU | |
| | | | AGCUAGAAA | mAmGmAmAmAmU | |
| | | | UAGCAAGUU | mAmGmCAAGUUAA | |
| | | | AAAAUAAGG | AAUAAGGCUAGUC | |
| | | | CUAGUCCGU | CGUUAUCACGAAA | |
| | | | UAUCACGAA | GGGCACCGAGUCG | |
| | | | AGGGCACCG | GmU*mG*mC*mU | |
| | | | AGUCGGUGC | | |
| | | | U | | |
| G028004 | 84 | GUCCUAGCAGUU | GUCCUAGCA | mG*mU*mC*CUAGC | chr6:31355150- |
| | | GUGGUCAU | GUUGUGGUC | AGUUGUGGUCAUG | 31355170 |
| | | | AUGUUUUAG | UUUUAGAmGmCmU | |
| | | | AGCUAGAAA | mAmGmAmAmAmU | |
| | | | UAGCAAGUU | mAmGmCAAGUUAA | |
| | | | AAAAUAAGG | AAUAAGGCUAGUC | |
| | | | CUAGUCCGU | CGUUAUCACGAAA | |
| | | | UAUCACGAA | GGGCACCGAGUCG | |
| | | | AGGGCACCG | GmU*mG*mC*mU | |
| | | | AGUCGGUGC | | |
| | | | U | | |
| G028005 | 85 | GUGUCUCUCACA | GUGUCUCUC | mG*mU*mG*UCUCU | chr6:31354480- |
| | | GCUUGAAA | ACAGCUUGA | CACAGCUUGAAAG | 31354500 |
| | | | AAGUUUUAG | UUUUAGAmGmCmU | |
| | | | AGCUAGAAA | mAmGmAmAmAmU | |
| | | | UAGCAAGUU | mAmGmCAAGUUAA | |
| | | | AAAAUAAGG | AAUAAGGCUAGUC | |
| | | | CUAGUCCGU | CGUUAUCACGAAA | |
| | | | UAUCACGAA | GGGCACCGAGUCG | |
| | | | AGGGCACCG | GmU*mG*mC*mU | |
| | | | AGUCGGUGC | | |
| | | | U | | |
| G028006 | 86 | UCAGACCCCCCA | UGUGUCUUU | mU*mG*mU*GUCU | chr6:31355576- |
| | | AAGACACA | GGGGGGUCU | UUGGGGGGUCUGA | 31355596 |
| | | | GAGUUUUAG | GUUUUAGAmGmCm | |
| | | | AGCUAGAAA | UmAmGmAmAmAm | |
| | | | UAGCAAGUU | UmAmGmCAAGUUA | |
| | | | AAAAUAAGG | AAAUAAGGCUAGU | |
| | | | CUAGUCCGU | CCGUUAUCACGAA | |
| | | | UAUCACGAA | AGGGCACCGAGUC | |
| | | | AGGGCACCG | GGmU*mG*mC*mU | |
| | | | AGUCGGUGC | | |
| | | | U | | |
| G028007 | 87 | CUCCUCAGACGC | CUCCUCAGA | mC*mU*mC*CUCAG | chr6:31357154- |
| | | CGAGAUGC | CGCCGAGAU | ACGCCGAGAUGCG | 31357174 |
| | | | GCGUUUUAG | UUUUAGAmGmCmU | |
| | | | AGCUAGAAA | mAmGmAmAmAmU | |
| | | | UAGCAAGUU | mAmGmCAAGUUAA | |
| | | | AAAAUAAGG | AAUAAGGCUAGUC | |
| | | | CUAGUCCGU | CGUUAUCACGAAA | |
| | | | UAUCACGAA | GGGCACCGAGUCG | |
| | | | AGGGCACCG | GmU*mG*mC*mU | |
| | | | AGUCGGUGC | | |
| | | | U | | |
| G028008 | 88 | GAGAUAGAACCU | GAGAUAGAA | mG*mA*mG*AUAG | chr6:31355410- |
| | | UCCAGAAG | CCUUCCAGA | AACCUUCCAGAAG | 31355430 |
| | | | AGGUUUUAG | GUUUUAGAmGmCm | |
| | | | AGCUAGAAA | UmAmGmAmAmAm | |
| | | | UAGCAAGUU | UmAmGmCAAGUUA | |
| | | | AAAAUAAGG | AAAUAAGGCUAGU | |
| | | | CUAGUCCGU | CCGUUAUCACGAA | |
| | | | UAUCACGAA | AGGGCACCGAGUC | |
| | | | AGGGCACCG | GGmU*mG*mC*mU | |
| | | | AGUCGGUGC | | |
| | | | U | | |
| G028009 | 89 | GACCAGCAGGAG | GGUUCUAUC | mG*mG*mU*UCUA | chr6:31355419- |
| | | AUAGAACC | UCCUGCUGG | UCUCCUGCUGGUC | 31355439 |
| | | | UCGUUUUAG | GUUUUAGAmGmCm | |
| | | | AGCUAGAAA | UmAmGmAmAmAm | |
| | | | UAGCAAGUU | UmAmGmCAAGUUA | |
| | | | AAAAUAAGG | AAAUAAGGCUAGU | |
| | | | CUAGUCCGU | CCGUUAUCACGAA | |
| | | | UAUCACGAA | AGGGCACCGAGUC | |
| | | | AGGGCACCG | GGmU*mG*mC*mU | |
| | | | AGUCGGUGC | | |
| | | | U | | |
| G028010 | 90 | GCAGGAGAUAGA | UGGAAGGUU | mU*mG*mG*AAGG | chr6:31355414- |
| | | ACCUUCCA | CUAUCUCCU | UUCUAUCUCCUGC | 31355434 |
| | | | GCGUUUUAG | GUUUUAGAmGmCm | |
| | | | AGCUAGAAA | UmAmGmAmAmAm | |
| | | | UAGCAAGUU | UmAmGmCAAGUUA | |
| | | | AAAAUAAGG | AAAUAAGGCUAGU | |
| | | | CUAGUCCGU | CCGUUAUCACGAA | |
| | | | UAUCACGAA | AGGGCACCGAGUC | |
| | | | AGGGCACCG | GGmU*mG*mC*mU | |
| | | | AGUCGGUGC | | |
| | | | U | | |
| G028011 | 91 | AGAUAGAACCUU | AGAUAGAAC | mA*mG*mA*UAGA | chr6:31355409- |
| | | CCAGAAGU | CUUCCAGAA | ACCUUCCAGAAGU | 31355429 |
| | | | GUGUUUUAG | GUUUUAGAmGmCm | |
| | | | AGCUAGAAA | UmAmGmAmAmAm | |
| | | | UAGCAAGUU | UmAmGmCAAGUUA | |
| | | | AAAAUAAGG | AAAUAAGGCUAGU | |
| | | | CUAGUCCGU | CCGUUAUCACGAA | |
| | | | UAUCACGAA | AGGGCACCGAGUC | |
| | | | AGGGCACCG | GGmU*mG*mC*mU | |
| | | | AGUCGGUGC | | |
| | | | U | | |

TABLE 3
Exemplary N. meningitidis (Nme) HLA-B guide RNAs

| | SEQ ID | | Exemplary | Exemplary Guide | |
|---|---|---|---|---|---|
| | NO to | | Guide RNA Full | RNA Modified | |
| | the | | Sequence | Sequence | Genomic |
| | Guide | | (SEQ ID NOs: | (SEQ ID NOs: | Coordinates |
| Guide ID | Sequence | Guide Sequence | 1101-1185) | 2101-2185) | (hg38) |
| G028789 | 101 | CUUCUGGAG | CUUCUGGAG | mC*mU*mU*mCmUG | chr6: 31355361- |
| | | AAGAGCAGA | AAGAGCAGA | GmAmGAmAGmAGC | 31355385 |
| | | GAUACA | GAUACAGUU | AGmAGAUmACAmG | |
| | | | GUAGCUCCCU | UUGmUmAmGmCUC | |
| | | | GAAACCGUU | CCmUmGmAmAmAm | |
| | | | GCUACAAUA | CmCGUUmGmCUAm | |
| | | | AGGCCGUCG | CAAU*AAGmGmCC | |
| | | | AAAGAUGUG | mGmUmCmGmAmA | |
| | | | CCGCAACGCU | mAmGmAmUGUGCm | |
| | | | CUGCCUUCUG | CGmCAAmCGCUCU | |
| | | | GCAUCGUU | mGmCCmUmUmCmU | |
| | | | | GGCAUCG*mU*mU | |
| G028790 | 102 | CACAUGCCAU | CACAUGCCAU | mC*mA*mC*mAmUG | chr6: 31355339- |
| | | GUACAGCAU | GUACAGCAU | CmCmAUmGUmACA | 31355363 |
| | | GAGGG | GAGGGGUUG | GCmAUGAmGGGmG | |
| | | | UAGCUCCCUG | UUGmUmAmGmCUC | |
| | | | AAACCGUUG | CCmUmGmAmAmAm | |
| | | | CUACAAUAA | CmCGUUmGmCUAm | |
| | | | GGCCGUCGA | CAAU*AAGmGmCC | |
| | | | AAGAUGUGC | mGmUmCmGmAmA | |
| | | | CGCAACGCUC | mAmGmAmUGUGCm | |
| | | | UGCCUUCUG | CGmCAAmCGCUCU | |
| | | | GCAUCGUU | mGmCCmUmUmCmU | |
| | | | | GGCAUCG*mU*mU | |
| G028791 | 103 | CACUGACCUG | CACUGACCUG | mC*mA*mC*mUmGA | chr6: 31355469- |
| | | GCAGCGGGA | GCAGCGGGA | CmCmUGmGCmAGC | 31355493 |
| | | UGGCG | UGGCGGUUG | GGmGAUGmGCGmG | |
| | | | UAGCUCCCUG | UUGmUmAmGmCUC | |
| | | | AAACCGUUG | CCmUmGmAmAmAm | |
| | | | CUACAAUAA | CmCGUUmGmCUAm | |
| | | | GGCCGUCGA | CAAU*AAGmGmCC | |
| | | | AAGAUGUGC | mGmUmCmGmAmA | |
| | | | CGCAACGCUC | mAmGmAmUGUGCm | |
| | | | UGCCUUCUG | CGmCAAmCGCUCU | |
| | | | GCAUCGUU | mGmCCmUmUmCmU | |
| | | | | GGCAUCG*mU*mU | |
| G028792 | 104 | CCAUGUACA | CCAUGUACA | mC*mC*mA*mUmGU | chr6: 31355333- |
| | | GCAUGAGGG | GCAUGAGGG | AmCmAGmCAmUGA | 31355357 |
| | | GCUGCC | GCUGCCGUU | GGmGGCUmGCCmG | |
| | | | GUAGCUCCCU | UUGmUmAmGmCUC | |
| | | | GAAACCGUU | CCmUmGmAmAmAm | |
| | | | GCUACAAUA | CmCGUUmGmCUAm | |
| | | | AGGCCGUCG | CAAU*AAGmGmCC | |
| | | | AAAGAUGUG | mGmUmCmGmAmA | |
| | | | CCGCAACGCU | mAmGmAmUGUGCm | |
| | | | CUGCCUUCUG | CGmCAAmCGCUCU | |
| | | | GCAUCGUU | mGmCCmUmUmCmU | |
| | | | | GGCAUCG*mU*mU | |
| G028793 | 105 | CUUACACGCA | CUUACACGCA | mC*mU*mU*mAmCA | chr6: 31354627- |
| | | GCCUGAGAG | GCCUGAGAG | CmGmCAmGCmCUG | 31354651 |
| | | UAGCU | UAGCUGUUG | AGmAGUAmGCUmG | |
| | | | UAGCUCCCUG | UUGmUmAmGmCUC | |
| | | | AAACCGUUG | CCmUmGmAmAmAm | |
| | | | CUACAAUAA | CmCGUUmGmCUAm | |
| | | | GGCCGUCGA | CAAU*AAGmGmCC | |
| | | | AAGAUGUGC | mGmUmCmGmAmA | |
| | | | CGCAACGCUC | mAmGmAmUGUGCm | |
| | | | UGCCUUCUG | CGmCAAmCGCUCU | |
| | | | GCAUCGUU | mGmCCmUmUmCmU | |
| | | | | GGCAUCG*mU*mU | |
| G028794 | 106 | AGCUGCCCAC | AGCUGCCCAC | mA*mG*mC*mUmGC | chr6: 31355401- |
| | | UUCUGGAAG | UUCUGGAAG | CmCmACmUUmCUG | 31355425 |
| | | GUUCU | GUUCUGUUG | GAmAGGUmUCUmG | |
| | | | UAGCUCCCUG | UUGmUmAmGmCUC | |
| | | | AAACCGUUG | CCmUmGmAmAmAm | |
| | | | CUACAAUAA | CmCGUUmGmCUAm | |
| | | | GGCCGUCGA | CAAU*AAGmGmCC | |
| | | | AAGAUGUGC | mGmUmCmGmAmA | |
| | | | CGCAACGCUC | mAmGmAmUGUGCm | |
| | | | UGCCUUCUG | CGmCAAmCGCUCU | |
| | | | GCAUCGUU | mGmCCmUmUmCmU | |
| | | | | GGCAUCG*mU*mU | |
| G028795 | 107 | CUUCCAGAA | CUUCCAGAA | mC*mU*mU*mCmCA | chr6: 31355390- |
| | | GUGGGCAGC | GUGGGCAGC | GmAmAGmUGmGGC | 31355414 |
| | | UGUGGU | UGUGGUGUU | AGmCUGUmGGUmG | |
| | | | GUAGCUCCCU | UUGmUmAmGmCUC | |
| | | | GAAACCGUU | CCmUmGmAmAmAm | |
| | | | GCUACAAUA | CmCGUUmGmCUAm | |
| | | | AGGCCGUCG | CAAU*AAGmGmCC | |
| | | | AAAGAUGUG | mGmUmCmGmAmA | |
| | | | CCGCAACGCU | mAmGmAmUGUGCm | |
| | | | CUGCCUUCUG | CGmCAAmCGCUCU | |
| | | | GCAUCGUU | mGmCCmUmUmCmU | |
| | | | | GGCAUCG*mU*mU | |
| G028796 | 108 | CCAUCUCAGG | CCAUCUCAGG | mC*mC*mA*mUmCU | chr6: 31355317- |
| | | GUGAGGGGC | GUGAGGGGC | CmAmGGmGUmGAG | 31355341 |
| | | UUCGG | UUCGGGUUG | GGmGCUUmCGGmG | |
| | | | UAGCUCCCUG | UUGmUmAmGmCUC | |
| | | | AAACCGUUG | CCmUmGmAmAmAm | |
| | | | CUACAAUAA | CmCGUUmGmCUAm | |
| | | | GGCCGUCGA | CAAU*AAGmGmCC | |
| | | | AAGAUGUGC | mGmUmCmGmAmA | |
| | | | CGCAACGCUC | mAmGmAmUGUGCm | |
| | | | UGCCUUCUG | CGmCAAmCGCUCU | |
| | | | GCAUCGUU | mGmCCmUmUmCmU | |
| | | | | GGCAUCG*mU*mU | |
| G028797 | 109 | CAUCUCAGG | CAUCUCAGG | mC*mA*mU*mCmUC | chr6: 31355318- |
| | | GUGAGGGGC | GUGAGGGGC | AmGmGGmUGmAGG | 31355342 |
| | | UUCGGC | UUCGGCGUU | GGmCUUCmGGCmG | |
| | | | GUAGCUCCCU | UUGmUmAmGmCUC | |
| | | | GAAACCGUU | CCmUmGmAmAmAm | |
| | | | GCUACAAUA | CmCGUUmGmCUAm | |
| | | | AGGCCGUCG | CAAU*AAGmGmCC | |
| | | | AAAGAUGUG | mGmUmCmGmAmA | |
| | | | CCGCAACGCU | mAmGmAmUGUGCm | |
| | | | CUGCCUUCUG | CGmCAAmCGCUCU | |
| | | | GCAUCGUU | mGmCCmUmUmCmU | |
| | | | | GGCAUCG*mU*mU | |
| G028798 | 110 | CAGCAUGAG | CAGCAUGAG | mC*mA*mG*mCmAU | chr6: 31355326- |
| | | GGGCUGCCG | GGGCUGCCG | GmAmGGmGGmCUG | 31355350 |
| | | AAGCCC | AAGCCCGUU | CCmGAAGmCCCmG | |
| | | | GUAGCUCCCU | UUGmUmAmGmCUC | |
| | | | GAAACCGUU | CCmUmGmAmAmAm | |
| | | | | CmCGUUmGmCUAm | |
| | | | GCUACAAUA | CAAU*AAGmGmCC | |
| | | | AGGCCGUCG | mGmUmCmGmAmA | |
| | | | AAAGAUGUG | mAmGmAmUGUGCm | |
| | | | CCGCAACGCU | CGmCAAmCGCUCU | |
| | | | CUGCCUUCUG | mGmCCmUmUmCmU | |
| | | | GCAUCGUU | GGCAUCG*mU*mU | |
| G028799 | 111 | CCCAUCUCAG | CCCAUCUCAG | mC*mC*mC*mAmUC | chr6: 31355316- |
| | | GGUGAGGGG | GGUGAGGGG | UmCmAGmGGmUGA | 31355340 |
| | | CUUCG | CUUCGGUUG | GGmGGCUmUCGmG | |
| | | | UAGCUCCCUG | UUGmUmAmGmCUC | |
| | | | AAACCGUUG | CCmUmGmAmAmAm | |
| | | | CUACAAUAA | CmCGUUmGmCUAm | |
| | | | GGCCGUCGA | CAAU*AAGmGmCC | |
| | | | AAGAUGUGC | mGmUmCmGmAmA | |
| | | | CGCAACGCUC | mAmGmAmUGUGCm | |
| | | | UGCCUUCUG | CGmCAAmCGCUCU | |
| | | | GCAUCGUU | mGmCCmUmUmCmU | |
| | | | | GGCAUCG*mU*mU | |
| G028800 | 112 | AUGUACAGC | AUGUACAGC | mA*mU*mG*mUmAC | chr6: 31355331- |
| | | AUGAGGGGC | AUGAGGGGC | AmGmCAmUGmAGG | 31355355 |
| | | UGCCGA | UGCCGAGUU | GGmCUGCmCGAmG | |
| | | | GUAGCUCCCU | UUGmUmAmGmCUC | |
| | | | GAAACCGUU | CCmUmGmAmAmAm | |
| | | | GCUACAAUA | CmCGUUmGmCUAm | |
| | | | AGGCCGUCG | CAAU*AAGmGmCC | |
| | | | AAAGAUGUG | mGmUmCmGmAmA | |
| | | | CCGCAACGCU | mAmGmAmUGUGCm | |
| | | | CUGCCUUCUG | CGmCAAmCGCUCU | |
| | | | GCAUCGUU | mGmCCmUmUmCmU | |
| | | | | GGCAUCG*mU*mU | |
| G028801 | 113 | CAUGUACAG | CAUGUACAG | mC*mA*mU*mGmUA | chr6: 31355332- |
| | | CAUGAGGGG | CAUGAGGGG | CmAmGCmAUmGAG | 31355356 |
| | | CUGCCG | CUGCCGGUU | GGmGCUGmCCGmG | |
| | | | GUAGCUCCCU | | |
| | | | GAAACCGUU | UUGmUmAmGmCUC | |
| | | | GCUACAAUA | CCmUmGmAmAmAm | |
| | | | AGGCCGUCG | CmCGUUmGmCUAm | |
| | | | AAAGAUGUG | CAAU*AAGmGmCC | |
| | | | CCGCAACGCU | mGmUmCmGmAmA | |
| | | | CUGCCUUCUG | mAmGmAmUGUGCm | |
| | | | GCAUCGUU | CGmCAAmCGCUCU | |
| | | | | mGmCCmUmUmCmU | |
| | | | | GGCAUCG*mU*mU | |
| G028802 | 114 | AGAUCACCCA | AGAUCACCCA | mA*mG*mA*mUmCA | chr6: 31356262- |
| | | GCGCAAGUG | GCGCAAGUG | CmCmCAmGCmGCA | 31356286 |
| | | GGAGG | GGAGGGUUG | AGmUGGGmAGGmG | |
| | | | UAGCUCCCUG | UUGmUmAmGmCUC | |
| | | | AAACCGUUG | CCmUmGmAmAmAm | |
| | | | CUACAAUAA | CmCGUUmGmCUAm | |
| | | | GGCCGUCGA | CAAU*AAGmGmCC | |
| | | | AAGAUGUGC | mGmUmCmGmAmA | |
| | | | CGCAACGCUC | mAmGmAmUGUGCm | |
| | | | UGCCUUCUG | CGmCAAmCGCUCU | |
| | | | GCAUCGUU | mGmCCmUmUmCmU | |
| | | | | GGCAUCG*mU*mU | |
| G028803 | 115 | CAGAUCACCC | CAGAUCACCC | mC*mA*mG*mAmUC | chr6: 31356263- |
| | | AGCGCAAGU | AGCGCAAGU | AmCmCCmAGmCGC | 31356287 |
| | | GGGAG | GGGAGGUUG | AAmGUGGmGAGmG | |
| | | | UAGCUCCCUG | UUGmUmAmGmCUC | |
| | | | AAACCGUUG | CCmUmGmAmAmAm | |
| | | | CUACAAUAA | CmCGUUmGmCUAm | |
| | | | GGCCGUCGA | CAAU*AAGmGmCC | |
| | | | AAGAUGUGC | mGmUmCmGmAmA | |
| | | | CGCAACGCUC | mAmGmAmUGUGCm | |
| | | | UGCCUUCUG | CGmCAAmCGCUCU | |
| | | | GCAUCGUU | mGmCCmUmUmCmU | |
| | | | | GGCAUCG*mU*mU | |
| G028804 | 116 | GCCUCCCACU | GCCUCCCACU | mG*mC*mC*mUmCC | chr6: 31356267- |
| | | UGCGCUGGG | UGCGCUGGG | CmAmCUmUGmCGC | 31356291 |
| | | UGAUC | UGAUCGUUG | UGmGGUGmAUCmG | |
| | | | UAGCUCCCUG | UUGmUmAmGmCUC | |
| | | | AAACCGUUG | CCmUmGmAmAmAm | |
| | | | CUACAAUAA | CmCGUUmGmCUAm | |
| | | | GGCCGUCGA | CAAU*AAGmGmCC | |
| | | | AAGAUGUGC | mGmUmCmGmAmA | |
| | | | CGCAACGCUC | mAmGmAmUGUGCm | |
| | | | UGCCUUCUG | CGmCAAmCGCUCU | |
| | | | GCAUCGUU | mGmCCmUmUmCmU | |
| | | | | GGCAUCG*mU*mU | |
| G028805 | 117 | CCCAAUACUC | CCCAAUACUC | mC*mC*mC*mAmAU | chr6: 31356777- |
| | | CGGCCCCUCC | CGGCCCCUCC | AmCmUCmCGmGCC | 31356801 |
| | | UGCU | UGCUGUUGU | CCmUCCUmGCUmG | |
| | | | AGCUCCCUGA | UUGmUmAmGmCUC | |
| | | | AACCGUUGC | CCmUmGmAmAmAm | |
| | | | UACAAUAAG | CmCGUUmGmCUAm | |
| | | | GCCGUCGAA | CAAU*AAGmGmCC | |
| | | | AGAUGUGCC | mGmUmCmGmAmA | |
| | | | GCAACGCUCU | mAmGmAmUGUGCm | |
| | | | GCCUUCUGGC | CGmCAAmCGCUCU | |
| | | | AUCGUU | mGmCCmUmUmCmU | |
| | | | | GGCAUCG*mU*mU | |
| G028806 | 118 | CACUCACCGG | CACUCACCGG | mC*mA*mC*mUmCA | chr6: 31357078- |
| | | CCCAGGUCUC | CCCAGGUCUC | CmCmGGmCCmCAG | 31357102 |
| | | GGUC | GGUCGUUGU | GUmCUCGmGUCmG | |
| | | | AGCUCCCUGA | UUGmUmAmGmCUC | |
| | | | AACCGUUGC | CCmUmGmAmAmAm | |
| | | | UACAAUAAG | CmCGUUmGmCUAm | |
| | | | GCCGUCGAA | CAAU*AAGmGmCC | |
| | | | AGAUGUGCC | mGmUmCmGmAmA | |
| | | | GCAACGCUCU | mAmGmAmUGUGCm | |
| | | | GCCUUCUGGC | CGmCAAmCGCUCU | |
| | | | AUCGUU | mGmCCmUmUmCmU | |
| | | | | GGCAUCG*mU*mU | |
| G028807 | 119 | UAGAGCAGG | UAGAGCAGG | mU*mA*mG*mAmGC | chr6: 31356774- |
| | | AGGGGCCGG | AGGGGCCGG | AmGmGAmGGmGGC | 31356798 |
| | | AGUAUU | AGUAUUGUU | CGmGAGUmAUUmG | |
| | | | GUAGCUCCCU | UUGmUmAmGmCUC | |
| | | | GAAACCGUU | CCmUmGmAmAmAm | |
| | | | GCUACAAUA | CmCGUUmGmCUAm | |
| | | | AGGCCGUCG | CAAU*AAGmGmCC | |
| | | | AAAGAUGUG | mGmUmCmGmAmA | |
| | | | CCGCAACGCU | mAmGmAmUGUGCm | |
| | | | CUGCCUUCUG | CGmCAAmCGCUCU | |
| | | | GCAUCGUU | mGmCCmUmUmCmU | |
| | | | | GGCAUCG*mU*mU | |
| G028808 | 120 | CCGGCCCAGG | CCGGCCCAGG | mC*mC*mG*mGmCC | chr6: 31357084- |
| | | UCUCGGUCA | UCUCGGUCA | CmAmGGmUCmUCG | 31357108 |
| | | GGGCC | GGGCCGUUG | GUmCAGGmGCCmG | |
| | | | UAGCUCCCUG | UUGmUmAmGmCUC | |
| | | | AAACCGUUG | CCmUmGmAmAmAm | |
| | | | CUACAAUAA | CmCGUUmGmCUAm | |
| | | | GGCCGUCGA | CAAU*AAGmGmCC | |
| | | | AAGAUGUGC | mGmUmCmGmAmA | |
| | | | CGCAACGCUC | mAmGmAmUGUGCm | |
| | | | UGCCUUCUG | CGmCAAmCGCUCU | |
| | | | GCAUCGUU | mGmCCmUmUmCmU | |
| | | | | GGCAUCG*mU*mU | |
| G028809 | 121 | ACCACUUACA | ACCACUUACA | mA*mC*mC*mAmCU | chr6: 31354623- |
| | | CGCAGCCUGA | CGCAGCCUGA | UmAmCAmCGmCAG | 31354647 |
| | | GAGU | GAGUGUUGU | CCmUGAGmAGUmG | |
| | | | AGCUCCCUGA | UUGmUmAmGmCUC | |
| | | | AACCGUUGC | CCmUmGmAmAmAm | |
| | | | UACAAUAAG | CmCGUUmGmCUAm | |
| | | | GCCGUCGAA | CAAU*AAGmGmCC | |
| | | | AGAUGUGCC | mGmUmCmGmAmA | |
| | | | GCAACGCUCU | mAmGmAmUGUGCm | |
| | | | GCCUUCUGGC | CGmCAAmCGCUCU | |
| | | | AUCGUU | mGmCCmUmUmCmU | |
| | | | | GGCAUCG*mU*mU | |
| G028810 | 122 | CCACUUACAC | CCACUUACAC | mC*mC*mA*mCmUU | chr6: 31354624- |
| | | GCAGCCUGA | GCAGCCUGA | AmCmACmGCmAGC | 31354648 |
| | | GAGUA | GAGUAGUUG | CUmGAGAmGUAmG | |
| | | | UAGCUCCCUG | UUGmUmAmGmCUC | |
| | | | AAACCGUUG | CCmUmGmAmAmAm | |
| | | | CUACAAUAA | CmCGUUmGmCUAm | |
| | | | GGCCGUCGA | CAAU*AAGmGmCC | |
| | | | AAGAUGUGC | mGmUmCmGmAmA | |
| | | | CGCAACGCUC | mAmGmAmUGUGCm | |
| | | | UGCCUUCUG | CGmCAAmCGCUCU | |
| | | | GCAUCGUU | mGmCCmUmUmCmU | |
| | | | | GGCAUCG*mU*mU | |
| G028811 | 123 | UAUCUGCGG | UAUCUGCGG | mU*mA*mU*mCmUG | chr6: 31356201- |
| | | AGCCACUCCA | AGCCACUCCA | CmGmGAmGCmCAC | 31356225 |
| | | CGCAC | CGCACGUUG | UCmCACGmCACmG | |
| | | | UAGCUCCCUG | UUGmUmAmGmCUC | |
| | | | AAACCGUUG | CCmUmGmAmAmAm | |
| | | | CUACAAUAA | CmCGUUmGmCUAm | |
| | | | GGCCGUCGA | CAAU*AAGmGmCC | |
| | | | AAGAUGUGC | mGmUmCmGmAmA | |
| | | | CGCAACGCUC | mAmGmAmUGUGCm | |
| | | | UGCCUUCUG | CGmCAAmCGCUCU | |
| | | | GCAUCGUU | mGmCCmUmUmCmU | |
| | | | | GGCAUCG*mU*mU | |
| G028812 | 124 | AGCCUGAGA | AGCCUGAGA | mA*mG*mC*mCmUG | chr6: 31354636- |
| | | GUAGCUCCCU | GUAGCUCCCU | AmGmAGmUAmGCU | 31354660 |
| | | CCUUU | CCUUUGUUG | CCmCUCCmUUUmG | |
| | | | UAGCUCCCUG | UUGmUmAmGmCUC | |
| | | | AAACCGUUG | CCmUmGmAmAmAm | |
| | | | CUACAAUAA | CmCGUUmGmCUAm | |
| | | | GGCCGUCGA | CAAU*AAGmGmCC | |
| | | | AAGAUGUGC | mGmUmCmGmAmA | |
| | | | CGCAACGCUC | mAmGmAmUGUGCm | |
| | | | UGCCUUCUG | CGmCAAmCGCUCU | |
| | | | GCAUCGUU | mGmCCmUmUmCmU | |
| | | | | GGCAUCG*mU*mU | |
| G028813 | 125 | CCUGAGUUU | CCUGAGUUU | mC*mC*mU*mGmAG | chr6: 31355460- |
| | | GGUCCUCGCC | GGUCCUCGCC | UmUmUGmGUmCCU | 31355484 |
| | | AUCCC | AUCCCGUUG | CGmCCAUmCCCmG | |
| | | | UAGCUCCCUG | UUGmUmAmGmCUC | |
| | | | AAACCGUUG | CCmUmGmAmAmAm | |
| | | | CUACAAUAA | CmCGUUmGmCUAm | |
| | | | GGCCGUCGA | CAAU*AAGmGmCC | |
| | | | AAGAUGUGC | mGmUmCmGmAmA | |
| | | | CGCAACGCUC | mAmGmAmUGUGCm | |
| | | | UGCCUUCUG | CGmCAAmCGCUCU | |
| | | | GCAUCGUU | mGmCCmUmUmCmU | |
| | | | | GGCAUCG*mU*mU | |
| G028814 | 126 | GUGUAUCUC | GUGUAUCUC | mG*mU*mG*mUmA | chr6: 31355366- |
| | | UGCUCUUCUC | UGCUCUUCUC | UCmUmCUmGCmUC | 31355390 |
| | | CAGAA | CAGAAGUUG | UUCmUCCAmGAAm | |
| | | | UAGCUCCCUG | GUUGmUmAmGmCU | |
| | | | AAACCGUUG | CCCmUmGmAmAmA | |
| | | | CUACAAUAA | mCmCGUUmGmCUA | |
| | | | GGCCGUCGA | mCAAU*AAGmGmC | |
| | | | AAGAUGUGC | CmGmUmCmGmAmA | |
| | | | CGCAACGCUC | mAmGmAmUGUGCm | |
| | | | UGCCUUCUG | CGmCAAmCGCUCU | |
| | | | GCAUCGUU | mGmCCmUmUmCmU | |
| | | | | GGCAUCG*mU*mU | |
| G028815 | 127 | CUUCUCCAGA | CUUCUCCAGA | mC*mU*mU*mCmUC | chr6: 31355379- |
| | | AGGCACCACC | AGGCACCACC | CmAmGAmAGmGCA | 31355403 |
| | | ACAG | ACAGGUUGU | CCmACCAmCAGmG | |
| | | | AGCUCCCUGA | UUGmUmAmGmCUC | |
| | | | AACCGUUGC | CCmUmGmAmAmAm | |
| | | | UACAAUAAG | CmCGUUmGmCUAm | |
| | | | GCCGUCGAA | CAAU*AAGmGmCC | |
| | | | AGAUGUGCC | mGmUmCmGmAmA | |
| | | | GCAACGCUCU | mAmGmAmUGUGCm | |
| | | | GCCUUCUGGC | CGmCAAmCGCUCU | |
| | | | AUCGUU | mGmCCmUmUmCmU | |
| | | | | GGCAUCG*mU*mU | |
| G028816 | 128 | UACAUGGCA | UACAUGGCA | mU*mA*mC*mAmUG | chr6: 31355356- |
| | | UGUGUAUCU | UGUGUAUCU | GmCmAUmGUmGUA | 31355380 |
| | | CUGCUC | CUGCUCGUU | UCmUCUGmCUCmG | |
| | | | GUAGCUCCCU | UUGmUmAmGmCUC | |
| | | | GAAACCGUU | CCmUmGmAmAmAm | |
| | | | GCUACAAUA | CmCGUUmGmCUAm | |
| | | | AGGCCGUCG | CAAU*AAGmGmCC | |
| | | | AAAGAUGUG | mGmUmCmGmAmA | |
| | | | CCGCAACGCU | mAmGmAmUGUGCm | |
| | | | CUGCCUUCUG | CGmCAAmCGCUCU | |
| | | | GCAUCGUU | mGmCCmUmUmCmU | |
| | | | | GGCAUCG*mU*mU | |
| G028817 | 129 | UAUCUCUGC | UAUCUCUGC | mU*mA*mU*mCmUC | chr6: 31355369- |
| | | UCUUCUCCAG | UCUUCUCCAG | UmGmCUmCUmUCU | 31355393 |
| | | AAGGC | AAGGCGUUG | CCmAGAAmGGCmG | |
| | | | UAGCUCCCUG | UUGmUmAmGmCUC | |
| | | | AAACCGUUG | CCmUmGmAmAmAm | |
| | | | CUACAAUAA | CmCGUUmGmCUAm | |
| | | | GGCCGUCGA | CAAU*AAGmGmCC | |
| | | | AAGAUGUGC | mGmUmCmGmAmA | |
| | | | CGCAACGCUC | mAmGmAmUGUGCm | |
| | | | UGCCUUCUG | CGmCAAmCGCUCU | |
| | | | GCAUCGUU | mGmCCmUmUmCmU | |
| | | | | GGCAUCG*mU*mU | |
| G028818 | 130 | UGCUAGGAC | UGCUAGGAC | mU*mG*mC*mUmAG | chr6: 31355161- |
| | | AGCCAGGCCA | AGCCAGGCCA | GmAmCAmGCmCAG | 31355185 |
| | | GCAAC | GCAACGUUG | GCmCAGCmAACmG | |
| | | | UAGCUCCCUG | UUGmUmAmGmCUC | |
| | | | AAACCGUUG | CCmUmGmAmAmAm | |
| | | | CUACAAUAA | CmCGUUmGmCUAm | |
| | | | GGCCGUCGA | CAAU*AAGmGmCC | |
| | | | AAGAUGUGC | mGmUmCmGmAmA | |
| | | | CGCAACGCUC | mAmGmAmUGUGCm | |
| | | | | CGmCAAmCGCUCU | |
| | | | UGCCUUCUG | mGmCCmUmUmCmU | |
| | | | GCAUCGUU | GGCAUCG*mU*mU | |
| G028819 | 131 | GCUAGGACA | GCUAGGACA | mG*mC*mU*mAmGG | chr6: 31355162- |
| | | GCCAGGCCAG | GCCAGGCCAG | AmCmAGmCCmAGG | 31355186 |
| | | CAACA | CAACAGUUG | CCmAGCAmACAmG | |
| | | | UAGCUCCCUG | UUGmUmAmGmCUC | |
| | | | AAACCGUUG | CCmUmGmAmAmAm | |
| | | | CUACAAUAA | CmCGUUmGmCUAm | |
| | | | GGCCGUCGA | CAAU*AAGmGmCC | |
| | | | AAGAUGUGC | mGmUmCmGmAmA | |
| | | | CGCAACGCUC | mAmGmAmUGUGCm | |
| | | | UGCCUUCUG | CGmCAAmCGCUCU | |
| | | | GCAUCGUU | mGmCCmUmUmCmU | |
| | | | | GGCAUCG*mU*mU | |
| G028820 | 132 | GCUCCGAUG | GCUCCGAUG | mG*mC*mU*mCmCG | chr6: 31355144- |
| | | ACCACAACUG | ACCACAACUG | AmUmGAmCCmACA | 31355168 |
| | | CUAGG | CUAGGGUUG | ACmUGCUmAGGmG | |
| | | | UAGCUCCCUG | UUGmUmAmGmCUC | |
| | | | AAACCGUUG | CCmUmGmAmAmAm | |
| | | | CUACAAUAA | CmCGUUmGmCUAm | |
| | | | GGCCGUCGA | CAAU*AAGmGmCC | |
| | | | AAGAUGUGC | mGmUmCmGmAmA | |
| | | | CGCAACGCUC | mAmGmAmUGUGCm | |
| | | | UGCCUUCUG | CGmCAAmCGCUCU | |
| | | | GCAUCGUU | mGmCCmUmUmCmU | |
| | | | | GGCAUCG*mU*mU | |
| G028821 | 133 | UCGUGGGCA | UCGUGGGCA | mU*mC*mG*mUmGG | chr6: 31355166- |
| | | UUGUUGCUG | UUGUUGCUG | GmCmAUmUGmUUG | 31355190 |
| | | GCCUGG | GCCUGGGUU | CUmGGCCmUGGmG | |
| | | | GUAGCUCCCU | UUGmUmAmGmCUC | |
| | | | GAAACCGUU | CCmUmGmAmAmAm | |
| | | | GCUACAAUA | CmCGUUmGmCUAm | |
| | | | AGGCCGUCG | CAAU*AAGmGmCC | |
| | | | AAAGAUGUG | mGmUmCmGmAmA | |
| | | | CCGCAACGCU | mAmGmAmUGUGCm | |
| | | | CUGCCUUCUG | CGmCAAmCGCUCU | |
| | | | GCAUCGUU | mGmCCmUmUmCmU | |
| | | | | GGCAUCG*mU*mU | |
| G028822 | 134 | GAUGACCAC | GAUGACCAC | mG*mA*mU*mGmAC | chr6: 31355149- |
| | | AACUGCUAG | AACUGCUAG | CmAmCAmACmUGC | 31355173 |
| | | GACAGC | GACAGCGUU | UAmGGACmAGCmG | |
| | | | GUAGCUCCCU | UUGmUmAmGmCUC | |
| | | | GAAACCGUU | CCmUmGmAmAmAm | |
| | | | GCUACAAUA | CmCGUUmGmCUAm | |
| | | | AGGCCGUCG | CAAU*AAGmGmCC | |
| | | | AAAGAUGUG | mGmUmCmGmAmA | |
| | | | CCGCAACGCU | mAmGmAmUGUGCm | |
| | | | CUGCCUUCUG | CGmCAAmCGCUCU | |
| | | | GCAUCGUU | mGmCCmUmUmCmU | |
| | | | | GGCAUCG*mU*mU | |
| G028823 | 135 | GUCCUCGUUC | GUCCUCGUUC | mG*mU*mC*mCmUC | chr6: 31356326- |
| | | AGGGCGAUG | AGGGCGAUG | GmUmUCmAGmGGC | 31356350 |
| | | UAAUC | UAAUCGUUG | GAmUGUAmAUCmG | |
| | | | UAGCUCCCUG | UUGmUmAmGmCUC | |
| | | | AAACCGUUG | CCmUmGmAmAmAm | |
| | | | CUACAAUAA | CmCGUUmGmCUAm | |
| | | | GGCCGUCGA | CAAU*AAGmGmCC | |
| | | | AAGAUGUGC | mGmUmCmGmAmA | |
| | | | CGCAACGCUC | mAmGmAmUGUGCm | |
| | | | UGCCUUCUG | CGmCAAmCGCUCU | |
| | | | GCAUCGUU | mGmCCmUmUmCmU | |
| | | | | GGCAUCG*mU*mU | |
| G028824 | 136 | CGCAGCCUGA | CGCAGCCUGA | mC*mG*mC*mAmGC | chr6: 31354633- |
| | | GAGUAGCUC | GAGUAGCUC | CmUmGAmGAmGUA | 31354657 |
| | | CCUCC | CCUCCGUUGU | GCmUCCCmUCCmG | |
| | | | AGCUCCCUGA | UUGmUmAmGmCUC | |
| | | | AACCGUUGC | CCmUmGmAmAmAm | |
| | | | UACAAUAAG | CmCGUUmGmCUAm | |
| | | | GCCGUCGAA | CAAU*AAGmGmCC | |
| | | | AGAUGUGCC | mGmUmCmGmAmA | |
| | | | GCAACGCUCU | mAmGmAmUGUGCm | |
| | | | GCCUUCUGGC | CGmCAAmCGCUCU | |
| | | | AUCGUU | mGmCCmUmUmCmU | |
| | | | | GGCAUCG*mU*mU | |
| G028825 | 137 | GGUCAGUGU | GGUCAGUGU | mG*mG*mU*mCmAG | chr6: 31355491- |
| | | GAUCUCCGCA | GAUCUCCGCA | UmGmUGmAUmCUC | 31355515 |
| | | GGGUA | GGGUAGUUG | CGmCAGGmGUAmG | |
| | | | UAGCUCCCUG | UUGmUmAmGmCUC | |
| | | | AAACCGUUG | CCmUmGmAmAmAm | |
| | | | CUACAAUAA | CmCGUUmGmCUAm | |
| | | | GGCCGUCGA | CAAU*AAGmGmCC | |
| | | | AAGAUGUGC | mGmUmCmGmAmA | |
| | | | CGCAACGCUC | mAmGmAmUGUGCm | |
| | | | UGCCUUCUG | CGmCAAmCGCUCU | |
| | | | GCAUCGUU | mGmCCmUmUmCmU | |
| | | | | GGCAUCG*mU*mU | |
| G028826 | 138 | GUCAGUGUG | GUCAGUGUG | mG*mU*mC*mAmGU | chr6: 31355492- |
| | | AUCUCCGCAG | AUCUCCGCAG | GmUmGAmUCmUCC | 31355516 |
| | | GGUAG | GGUAGGUUG | GCmAGGGmUAGmG | |
| | | | UAGCUCCCUG | UUGmUmAmGmCUC | |
| | | | AAACCGUUG | CCmUmGmAmAmAm | |
| | | | CUACAAUAA | CmCGUUmGmCUAm | |
| | | | GGCCGUCGA | CAAU*AAGmGmCC | |
| | | | AAGAUGUGC | mGmUmCmGmAmA | |
| | | | CGCAACGCUC | mAmGmAmUGUGCm | |
| | | | UGCCUUCUG | CGmCAAmCGCUCU | |
| | | | GCAUCGUU | mGmCCmUmUmCmU | |
| | | | | GGCAUCG*mU*mU | |
| G028827 | 139 | UACAUCGCCC | UACAUCGCCC | mU*mA*mC*mAmUC | chr6: 31356317- |
| | | UGAACGAGG | UGAACGAGG | GmCmCCmUGmAAC | 31356341 |
| | | ACCUG | ACCUGGUUG | GAmGGACmCUGmG | |
| | | | UAGCUCCCUG | UUGmUmAmGmCUC | |
| | | | AAACCGUUG | CCmUmGmAmAmAm | |
| | | | CUACAAUAA | CmCGUUmGmCUAm | |
| | | | GGCCGUCGA | CAAU*AAGmGmCC | |
| | | | AAGAUGUGC | mGmUmCmGmAmA | |
| | | | CGCAACGCUC | mAmGmAmUGUGCm | |
| | | | UGCCUUCUG | CGmCAAmCGCUCU | |
| | | | GCAUCGUU | mGmCCmUmUmCmU | |
| | | | | GGCAUCG*mU*mU | |
| G028828 | 140 | GGCUCCCACU | GGCUCCCACU | mG*mG*mC*mUmCC | chr6: 31356928- |
| | | CCAUGAGGU | CCAUGAGGU | CmAmCUmCCmAUG | 31356952 |
| | | AUUUC | AUUUCGUUG | AGmGUAUmUUCmG | |
| | | | UAGCUCCCUG | UUGmUmAmGmCUC | |
| | | | AAACCGUUG | CCmUmGmAmAmAm | |
| | | | CUACAAUAA | CmCGUUmGmCUAm | |
| | | | GGCCGUCGA | CAAU*AAGmGmCC | |
| | | | AAGAUGUGC | mGmUmCmGmAmA | |
| | | | CGCAACGCUC | mAmGmAmUGUGCm | |
| | | | UGCCUUCUG | CGmCAAmCGCUCU | |
| | | | GCAUCGUU | mGmCCmUmUmCmU | |
| | | | | GGCAUCG*mU*mU | |
| G028829 | 141 | UCUUCUCCAG | UCUUCUCCAG | mU*mC*mU*mUmCU | chr6: 31355378- |
| | | AAGGCACCAC | AAGGCACCAC | CmCmAGmAAmGGC | 31355402 |
| | | CACA | CACAGUUGU | ACmCACCmACAmG | |
| | | | AGCUCCCUGA | UUGmUmAmGmCUC | |
| | | | AACCGUUGC | CCmUmGmAmAmAm | |
| | | | UACAAUAAG | CmCGUUmGmCUAm | |
| | | | GCCGUCGAA | CAAU*AAGmGmCC | |
| | | | AGAUGUGCC | mGmUmCmGmAmA | |
| | | | GCAACGCUCU | mAmGmAmUGUGCm | |
| | | | GCCUUCUGGC | CGmCAAmCGCUCU | |
| | | | AUCGUU | mGmCCmUmUmCmU | |
| | | | | GGCAUCG*mU*mU | |
| G028830 | 142 | AGCAUGAGG | AGCAUGAGG | mA*mG*mC*mAmUG | chr6: 31355325- |
| | | GGCUGCCGA | GGCUGCCGA | AmGmGGmGCmUGC | 31355349 |
| | | AGCCCC | AGCCCCGUUG | CGmAAGCmCCCmG | |
| | | | UAGCUCCCUG | UUGmUmAmGmCUC | |
| | | | AAACCGUUG | CCmUmGmAmAmAm | |
| | | | CUACAAUAA | CmCGUUmGmCUAm | |
| | | | GGCCGUCGA | CAAU*AAGmGmCC | |
| | | | AAGAUGUGC | mGmUmCmGmAmA | |
| | | | CGCAACGCUC | mAmGmAmUGUGCm | |
| | | | UGCCUUCUG | CGmCAAmCGCUCU | |
| | | | GCAUCGUU | mGmCCmUmUmCmU | |
| | | | | GGCAUCG*mU*mU | |
| G028831 | 143 | AGACCAGACC | AGACCAGACC | mA*mG*mA*mCmCA | chr6: 31355415- |
| | | AGCAGGAGA | AGCAGGAGA | GmAmCCmAGmCAG | 31355439 |
| | | UAGAA | UAGAAGUUG | GAmGAUAmGAAmG | |
| | | | UAGCUCCCUG | UUGmUmAmGmCUC | |
| | | | AAACCGUUG | CCmUmGmAmAmAm | |
| | | | CUACAAUAA | CmCGUUmGmCUAm | |
| | | | GGCCGUCGA | CAAU*AAGmGmCC | |
| | | | AAGAUGUGC | mGmUmCmGmAmA | |
| | | | CGCAACGCUC | mAmGmAmUGUGCm | |
| | | | UGCCUUCUG | CGmCAAmCGCUCU | |
| | | | GCAUCGUU | mGmCCmUmUmCmU | |
| | | | | GGCAUCG*mU*mU | |
| G028832 | 144 | AAGGUUCUA | AAGGUUCUA | mA*mA*mG*mGmU | chr6: 31355417- |
| | | UCUCCUGCUG | UCUCCUGCUG | UCmUmAUmCUmCC | 31355441 |
| | | GUCUG | GUCUGGUUG | UGCmUGGUmCUGm | |
| | | | UAGCUCCCUG | GUUGmUmAmGmCU | |
| | | | AAACCGUUG | CCCmUmGmAmAmA | |
| | | | CUACAAUAA | mCmCGUUmGmCUA | |
| | | | GGCCGUCGA | mCAAU*AAGmGmC | |
| | | | AAGAUGUGC | CmGmUmCmGmAmA | |
| | | | CGCAACGCUC | mAmGmAmUGUGCm | |
| | | | UGCCUUCUG | CGmCAAmCGCUCU | |
| | | | GCAUCGUU | mGmCCmUmUmCmU | |
| | | | | GGCAUCG*mU*mU | |
| G028833 | 145 | GUGGAGACC | GUGGAGACC | mG*mU*mG*mGmA | chr6: 31355419- |
| | | AGACCAGCA | AGACCAGCA | GAmCmCAmGAmCC | 31355443 |
| | | GGAGAU | GGAGAUGUU | AGCmAGGAmGAUm | |
| | | | GUAGCUCCCU | GUUGmUmAmGmCU | |
| | | | GAAACCGUU | CCCmUmGmAmAmA | |
| | | | GCUACAAUA | mCmCGUUmGmCUA | |
| | | | AGGCCGUCG | mCAAU*AAGmGmC | |
| | | | AAAGAUGUG | CmGmUmCmGmAmA | |
| | | | CCGCAACGCU | mAmGmAmUGUGCm | |
| | | | | CGmCAAmCGCUCU | |
| | | | CUGCCUUCUG | mGmCCmUmUmCmU | |
| | | | GCAUCGUU | GGCAUCG*mU*mU | |
| G028834 | 146 | GCAAGGAUU | GCAAGGAUU | mG*mC*mA*mAmGG | chr6: 31356325- |
| | | ACAUCGCCCU | ACAUCGCCCU | AmUmUAmCAmUCG | 31356349 |
| | | GAACG | GAACGGUUG | CCmCUGAmACGmG | |
| | | | UAGCUCCCUG | UUGmUmAmGmCUC | |
| | | | AAACCGUUG | CCmUmGmAmAmAm | |
| | | | CUACAAUAA | CmCGUUmGmCUAm | |
| | | | GGCCGUCGA | CAAU*AAGmGmCC | |
| | | | AAGAUGUGC | mGmUmCmGmAmA | |
| | | | CGCAACGCUC | mAmGmAmUGUGCm | |
| | | | UGCCUUCUG | CGmCAAmCGCUCU | |
| | | | GCAUCGUU | mGmCCmUmUmCmU | |
| | | | | GGCAUCG*mU*mU | |
| G028835 | 147 | ACCAUGAGG | ACCAUGAGG | mA*mC*mC*mAmUG | chr6: 31355523- |
| | | CCACCCUGAG | CCACCCUGAG | AmGmGCmCAmCCC | 31355547 |
| | | GUGCU | GUGCUGUUG | UGmAGGUmGCUmG | |
| | | | UAGCUCCCUG | UUGmUmAmGmCUC | |
| | | | AAACCGUUG | CCmUmGmAmAmAm | |
| | | | CUACAAUAA | CmCGUUmGmCUAm | |
| | | | GGCCGUCGA | CAAU*AAGmGmCC | |
| | | | AAGAUGUGC | mGmUmCmGmAmA | |
| | | | CGCAACGCUC | mAmGmAmUGUGCm | |
| | | | UGCCUUCUG | CGmCAAmCGCUCU | |
| | | | GCAUCGUU | mGmCCmUmUmCmU | |
| | | | | GGCAUCG*mU*mU | |
| G028836 | 148 | GACCAUGAG | GACCAUGAG | mG*mA*mC*mCmAU | chr6: 31355524- |
| | | GCCACCCUGA | GCCACCCUGA | GmAmGGmCCmACC | 31355548 |
| | | GGUGC | GGUGCGUUG | CUmGAGGmUGCmG | |
| | | | UAGCUCCCUG | UUGmUmAmGmCUC | |
| | | | AAACCGUUG | CCmUmGmAmAmAm | |
| | | | CUACAAUAA | CmCGUUmGmCUAm | |
| | | | GGCCGUCGA | CAAU*AAGmGmCC | |
| | | | AAGAUGUGC | mGmUmCmGmAmA | |
| | | | CGCAACGCUC | mAmGmAmUGUGCm | |
| | | | UGCCUUCUG | CGmCAAmCGCUCU | |
| | | | GCAUCGUU | mGmCCmUmUmCmU | |
| | | | | GGCAUCG*mU*mU | |
| G028837 | 149 | ACCACCCCAU | ACCACCCCAU | mA*mC*mC*mAmCC | chr6: 31355538- |
| | | CUCUGACCAU | CUCUGACCAU | CmCmAUmCUmCUG | 31355562 |
| | | GAGG | GAGGGUUGU | ACmCAUGmAGGmG | |
| | | | AGCUCCCUGA | UUGmUmAmGmCUC | |
| | | | AACCGUUGC | CCmUmGmAmAmAm | |
| | | | UACAAUAAG | CmCGUUmGmCUAm | |
| | | | GCCGUCGAA | CAAU*AAGmGmCC | |
| | | | AGAUGUGCC | mGmUmCmGmAmA | |
| | | | GCAACGCUCU | mAmGmAmUGUGCm | |
| | | | GCCUUCUGGC | CGmCAAmCGCUCU | |
| | | | AUCGUU | mGmCCmUmUmCmU | |
| | | | | GGCAUCG*mU*mU | |
| G028838 | 150 | CACCACCCCA | CACCACCCCA | mC*mA*mC*mCmAC | chr6: 31355539- |
| | | UCUCUGACCA | UCUCUGACCA | CmCmCAmUCmUCU | 31355563 |
| | | UGAG | UGAGGUUGU | GAmCCAUmGAGmG | |
| | | | AGCUCCCUGA | UUGmUmAmGmCUC | |
| | | | AACCGUUGC | CCmUmGmAmAmAm | |
| | | | UACAAUAAG | CmCGUUmGmCUAm | |
| | | | GCCGUCGAA | CAAU*AAGmGmCC | |
| | | | AGAUGUGCC | mGmUmCmGmAmA | |
| | | | GCAACGCUCU | mAmGmAmUGUGCm | |
| | | | GCCUUCUGGC | CGmCAAmCGCUCU | |
| | | | AUCGUU | mGmCCmUmUmCmU | |
| | | | | GGCAUCG*mU*mU | |
| G028839 | 151 | AUGCCCGCGG | AUGCCCGCGG | mA*mU*mG*mCmCC | chr6: 31356374- |
| | | AGGAGGCGC | AGGAGGCGC | GmCmGGmAGmGAG | 31356398 |
| | | CCGUC | CCGUCGUUG | GCmGCCCmGUCmG | |
| | | | UAGCUCCCUG | UUGmUmAmGmCUC | |
| | | | AAACCGUUG | CCmUmGmAmAmAm | |
| | | | CUACAAUAA | CmCGUUmGmCUAm | |
| | | | GGCCGUCGA | CAAU*AAGmGmCC | |
| | | | AAGAUGUGC | mGmUmCmGmAmA | |
| | | | CGCAACGCUC | mAmGmAmUGUGCm | |
| | | | UGCCUUCUG | CGmCAAmCGCUCU | |
| | | | GCAUCGUU | mGmCCmUmUmCmU | |
| | | | | GGCAUCG*mU*mU | |
| G028840 | 152 | GAGGCGCCCG | GAGGCGCCCG | mG*mA*mG*mGmCG | chr6: 31356386- |
| | | UCCGGCCCCA | UCCGGCCCCA | CmCmCGmUCmCGG | 31356410 |
| | | CGUC | CGUCGUUGU | CCmCCACmGUCmG | |
| | | | AGCUCCCUGA | UUGmUmAmGmCUC | |
| | | | AACCGUUGC | CCmUmGmAmAmAm | |
| | | | UACAAUAAG | CmCGUUmGmCUAm | |
| | | | GCCGUCGAA | CAAU*AAGmGmCC | |
| | | | AGAUGUGCC | mGmUmCmGmAmA | |
| | | | GCAACGCUCU | mAmGmAmUGUGCm | |
| | | | GCCUUCUGGC | CGmCAAmCGCUCU | |
| | | | AUCGUU | mGmCCmUmUmCmU | |
| | | | | GGCAUCG*mU*mU | |
| G028841 | 153 | GCUGCGACG | GCUGCGACG | mG*mC*mU*mGmCG | chr6: 31356385- |
| | | UGGGGCCGG | UGGGGCCGG | AmCmGUmGGmGGC | 31356409 |
| | | ACGGGC | ACGGGCGUU | CGmGACGmGGCmG | |
| | | | GUAGCUCCCU | UUGmUmAmGmCUC | |
| | | | GAAACCGUU | CCmUmGmAmAmAm | |
| | | | GCUACAAUA | CmCGUUmGmCUAm | |
| | | | AGGCCGUCG | CAAU*AAGmGmCC | |
| | | | AAAGAUGUG | mGmUmCmGmAmA | |
| | | | CCGCAACGCU | mAmGmAmUGUGCm | |
| | | | CUGCCUUCUG | CGmCAAmCGCUCU | |
| | | | GCAUCGUU | mGmCCmUmUmCmU | |
| | | | | GGCAUCG*mU*mU | |
| G028842 | 154 | GCGACGUGG | GCGACGUGG | mG*mC*mG*mAmCG | chr6: 31356382- |
| | | GGCCGGACG | GGCCGGACG | UmGmGGmGCmCGG | 31356406 |
| | | GGCGCC | GGCGCCGUU | ACmGGGCmGCCmG | |
| | | | GUAGCUCCCU | UUGmUmAmGmCUC | |
| | | | GAAACCGUU | CCmUmGmAmAmAm | |
| | | | GCUACAAUA | CmCGUUmGmCUAm | |
| | | | AGGCCGUCG | CAAU*AAGmGmCC | |
| | | | AAAGAUGUG | mGmUmCmGmAmA | |
| | | | CCGCAACGCU | mAmGmAmUGUGCm | |
| | | | CUGCCUUCUG | CGmCAAmCGCUCU | |
| | | | GCAUCGUU | mGmCCmUmUmCmU | |
| | | | | GGCAUCG*mU*mU | |
| G028843 | 155 | CGUGAGGUU | CGUGAGGUU | mC*mG*mU*mGmAG | chr6: 31356830- |
| | | CGACAGCGAC | CGACAGCGAC | GmUmUCmGAmCAG | 31356854 |
| | | GCCGC | GCCGCGUUG | CGmACGCmCGCmG | |
| | | | UAGCUCCCUG | UUGmUmAmGmCUC | |
| | | | AAACCGUUG | CCmUmGmAmAmAm | |
| | | | CUACAAUAA | CmCGUUmGmCUAm | |
| | | | GGCCGUCGA | CAAU*AAGmGmCC | |
| | | | AAGAUGUGC | mGmUmCmGmAmA | |
| | | | CGCAACGCUC | mAmGmAmUGUGCm | |
| | | | UGCCUUCUG | CGmCAAmCGCUCU | |
| | | | GCAUCGUU | mGmCCmUmUmCmU | |
| | | | | GGCAUCG*mU*mU | |
| G028931 | 156 | UCCUUUUCCA | UCCUUUUCCA | mU*mC*mC*mUmUU | chr6: 31354654- |
| | | CCUGUGGGA | CCUGUGGGA | UmCmCAmCCmUGU | 31354678 |
| | | AGAAA | AGAAAGUUG | GGmGAAGmAAAmG | |
| | | | UAGCUCCCUG | UUGmUmAmGmCUC | |
| | | | AAACCGUUG | CCmUmGmAmAmAm | |
| | | | CUACAAUAA | CmCGUUmGmCUAm | |
| | | | GGCCGUCGA | CAAU*AAGmGmCC | |
| | | | AAGAUGUGC | mGmUmCmGmAmA | |
| | | | CGCAACGCUC | mAmGmAmUGUGCm | |
| | | | UGCCUUCUG | CGmCAAmCGCUCU | |
| | | | GCAUCGUU | mGmCCmUmUmCmU | |
| | | | | GGCAUCG*mU*mU | |
| G028932 | 157 | CAGAGCGAG | CAGAGCGAG | mC*mA*mG*mAmGC | chr6: 31356670- |
| | | GCCGGUGAG | GCCGGUGAG | GmAmGGmCCmGGU | 31356694 |
| | | | UGACCCGUU | GAmGUGAmCCCmG | |
| | | | GUAGCUCCCU | UUGmUmAmGmCUC | |
| | | | GAAACCGUU | CCmUmGmAmAmAm | |
| | | UGACCC | GCUACAAUA | CmCGUUmGmCUAm | |
| | | | AGGCCGUCG | CAAU*AAGmGmCC | |
| | | | AAAGAUGUG | mGmUmCmGmAmA | |
| | | | CCGCAACGCU | mAmGmAmUGUGCm | |
| | | | CUGCCUUCUG | CGmCAAmCGCUCU | |
| | | | GCAUCGUU | mGmCCmUmUmCmU | |
| | | | | GGCAUCG*mU*mU | |
| G032787 | 158 | GGUGUAGAA | GGUGUAGAA | mG*mG*mU*mGmU | chr6: 31356928- |
| | | AUACCUCAU | AUACCUCAU | AGmAmAAmUAmCC | 31356952 |
| | | GGAGUG | GGAGUGGUU | UCAmUGGAmGUGm | |
| | | | GUAGCUCCCU | GUUGmUmAmGmCU | |
| | | | GAAACCGUU | CCCmUmGmAmAmA | |
| | | | GCUACAAUA | mCmCGUUmGmCUA | |
| | | | AGGCCGUCG | mCAAU*AAGmGmC | |
| | | | AAAGAUGUG | CmGmUmCmGmAmA | |
| | | | CCGCAACGCU | mAmGmAmUGUGCm | |
| | | | CUGCCUUCUG | CGmCAAmCGCUCU | |
| | | | GCAUCGUU | mGmCCmUmUmCmU | |
| | | | | GGCAUCG*mU*mU | |
| G032788 | 159 | AGACCCUGGC | AGACCCUGGC | mA*mG*mA*mCmCC | chr6: 31356437- |
| | | CCCGGCCCCG | CCCGGCCCCG | UmGmGCmCCmCGG | 31356461 |
| | | CGGU | CGGUGUUGU | CCmCCGCmGGUmG | |
| | | | AGCUCCCUGA | UUGmUmAmGmCUC | |
| | | | AACCGUUGC | CCmUmGmAmAmAm | |
| | | | UACAAUAAG | CmCGUUmGmCUAm | |
| | | | GCCGUCGAA | CAAU*AAGmGmCC | |
| | | | AGAUGUGCC | mGmUmCmGmAmA | |
| | | | GCAACGCUCU | mAmGmAmUGUGCm | |
| | | | GCCUUCUGGC | CGmCAAmCGCUCU | |
| | | | AUCGUU | mGmCCmUmUmCmU | |
| | | | | GGCAUCG*mU*mU | |
| G032789 | 160 | GAGACCCUG | GAGACCCUG | mG*mA*mG*mAmCC | chr6: 31356436- |
| | | GCCCCGGCCC | GCCCCGGCCC | CmUmGGmCCmCCG | 31356460 |
| | | CGCGG | CGCGGGUUG | GCmCCCGmCGGmG | |
| | | | UAGCUCCCUG | UUGmUmAmGmCUC | |
| | | | AAACCGUUG | CCmUmGmAmAmAm | |
| | | | CUACAAUAA | CmCGUUmGmCUAm | |
| | | | GGCCGUCGA | CAAU*AAGmGmCC | |
| | | | AAGAUGUGC | mGmUmCmGmAmA | |
| | | | CGCAACGCUC | mAmGmAmUGUGCm | |
| | | | | CGmCAAmCGCUCU | |
| | | | UGCCUUCUG | mGmCCmUmUmCmU | |
| | | | GCAUCGUU | GGCAUCG*mU*mU | |
| G032790 | 161 | CUCACCGGCC | CUCACCGGCC | mC*mU*mC*mAmCC | chr6: 31356682- |
| | | UCGCUCUGG | UCGCUCUGG | GmGmCCmUCmGCU | 31356706 |
| | | UUGUA | UUGUAGUUG | CUmGGUUmGUAmG | |
| | | | UAGCUCCCUG | UUGmUmAmGmCUC | |
| | | | AAACCGUUG | CCmUmGmAmAmAm | |
| | | | CUACAAUAA | CmCGUUmGmCUAm | |
| | | | GGCCGUCGA | CAAU*AAGmGmCC | |
| | | | AAGAUGUGC | mGmUmCmGmAmA | |
| | | | CGCAACGCUC | mAmGmAmUGUGCm | |
| | | | UGCCUUCUG | CGmCAAmCGCUCU | |
| | | | GCAUCGUU | mGmCCmUmUmCmU | |
| | | | | GGCAUCG*mU*mU | |
| G032791 | 162 | CUGCGCGGCU | CUGCGCGGCU | mC*mU*mG*mCmGC | chr6: 31356694- |
| | | ACUACAACCA | ACUACAACCA | GmGmCUmACmUAC | 31356718 |
| | | GAGC | GAGCGUUGU | AAmCCAGmAGCmG | |
| | | | AGCUCCCUGA | UUGmUmAmGmCUC | |
| | | | AACCGUUGC | CCmUmGmAmAmAm | |
| | | | UACAAUAAG | CmCGUUmGmCUAm | |
| | | | GCCGUCGAA | CAAU*AAGmGmCC | |
| | | | AGAUGUGCC | mGmUmCmGmAmA | |
| | | | GCAACGCUCU | mAmGmAmUGUGCm | |
| | | | GCCUUCUGGC | CGmCAAmCGCUCU | |
| | | | AUCGUU | mGmCCmUmUmCmU | |
| | | | | GGCAUCG*mU*mU | |
| G032792 | 163 | CAAACUCAG | CAAACUCAG | mC*mA*mA*mAmCU | chr6: 31355446- |
| | | GACACUGAG | GACACUGAG | CmAmGGmACmACU | 31355470 |
| | | CUUGUG | CUUGUGGUU | GAmGCUUmGUGmG | |
| | | | GUAGCUCCCU | UUGmUmAmGmCUC | |
| | | | GAAACCGUU | CCmUmGmAmAmAm | |
| | | | GCUACAAUA | CmCGUUmGmCUAm | |
| | | | AGGCCGUCG | CAAU*AAGmGmCC | |
| | | | AAAGAUGUG | mGmUmCmGmAmA | |
| | | | CCGCAACGCU | mAmGmAmUGUGCm | |
| | | | CUGCCUUCUG | CGmCAAmCGCUCU | |
| | | | GCAUCGUU | mGmCCmUmUmCmU | |
| | | | | GGCAUCG*mU*mU | |
| G032793 | 164 | UCAGGACAC | UCAGGACAC | mU*mC*mA*mGmGA | chr6: 31355441- |
| | | UGAGCUUGU | UGAGCUUGU | CmAmCUmGAmGCU | 31355465 |
| | | GGAGAC | GGAGACGUU | UGmUGGAmGACmG | |
| | | | GUAGCUCCCU | UUGmUmAmGmCUC | |
| | | | GAAACCGUU | CCmUmGmAmAmAm | |
| | | | GCUACAAUA | CmCGUUmGmCUAm | |
| | | | AGGCCGUCG | CAAU*AAGmGmCC | |
| | | | AAAGAUGUG | mGmUmCmGmAmA | |
| | | | CCGCAACGCU | mAmGmAmUGUGCm | |
| | | | CUGCCUUCUG | CGmCAAmCGCUCU | |
| | | | GCAUCGUU | mGmCCmUmUmCmU | |
| | | | | GGCAUCG*mU*mU | |
| G032794 | 165 | UCUGGGAAA | UCUGGGAAA | mU*mC*mU*mGmGG | chr6: 31355222- |
| | | GGAGGGGAA | GGAGGGGAA | AmAmAGmGAmGGG | 31355246 |
| | | GAUGAG | GAUGAGGUU | GAmAGAUmGAGmG | |
| | | | GUAGCUCCCU | UUGmUmAmGmCUC | |
| | | | GAAACCGUU | CCmUmGmAmAmAm | |
| | | | GCUACAAUA | CmCGUUmGmCUAm | |
| | | | AGGCCGUCG | CAAU*AAGmGmCC | |
| | | | AAAGAUGUG | mGmUmCmGmAmA | |
| | | | CCGCAACGCU | mAmGmAmUGUGCm | |
| | | | CUGCCUUCUG | CGmCAAmCGCUCU | |
| | | | GCAUCGUU | mGmCCmUmUmCmU | |
| | | | | GGCAUCG*mU*mU | |
| G032795 | 166 | CUCUGGGAA | CUCUGGGAA | mC*mU*mC*mUmGG | chr6: 31355221- |
| | | AGGAGGGGA | AGGAGGGGA | GmAmAAmGGmAGG | 31355245 |
| | | AGAUGA | AGAUGAGUU | GGmAAGAmUGAmG | |
| | | | GUAGCUCCCU | UUGmUmAmGmCUC | |
| | | | GAAACCGUU | CCmUmGmAmAmAm | |
| | | | GCUACAAUA | CmCGUUmGmCUAm | |
| | | | AGGCCGUCG | CAAU*AAGmGmCC | |
| | | | AAAGAUGUG | mGmUmCmGmAmA | |
| | | | CCGCAACGCU | mAmGmAmUGUGCm | |
| | | | CUGCCUUCUG | CGmCAAmCGCUCU | |
| | | | GCAUCGUU | mGmCCmUmUmCmU | |
| | | | | GGCAUCG*mU*mU | |
| G032796 | 167 | ACCCAGUUCG | ACCCAGUUCG | mA*mC*mC*mCmAG | chr6: 31356844- |
| | | UGAGGUUCG | UGAGGUUCG | UmUmCGmUGmAGG | 31356868 |
| | | ACAGC | ACAGCGUUG | UUmCGACmAGCmG | |
| | | | UAGCUCCCUG | UUGmUmAmGmCUC | |
| | | | AAACCGUUG | CCmUmGmAmAmAm | |
| | | | CUACAAUAA | CmCGUUmGmCUAm | |
| | | | GGCCGUCGA | CAAU*AAGmGmCC | |
| | | | AAGAUGUGC | mGmUmCmGmAmA | |
| | | | CGCAACGCUC | mAmGmAmUGUGCm | |
| | | | UGCCUUCUG | CGmCAAmCGCUCU | |
| | | | GCAUCGUU | mGmCCmUmUmCmU | |
| | | | | GGCAUCG*mU*mU | |
| G032797 | 168 | CGCUGCCUGG | CGCUGCCUGG | mC*mG*mC*mUmGC | chr6: 31354520- |
| | | AGUAGAACA | AGUAGAACA | CmUmGGmAGmUAG | 31354544 |
| | | AAAAC | AAAACGUUG | AAmCAAAmAACmG | |
| | | | UAGCUCCCUG | UUGmUmAmGmCUC | |
| | | | AAACCGUUG | CCmUmGmAmAmAm | |
| | | | CUACAAUAA | CmCGUUmGmCUAm | |
| | | | GGCCGUCGA | CAAU*AAGmGmCC | |
| | | | AAGAUGUGC | mGmUmCmGmAmA | |
| | | | CGCAACGCUC | mAmGmAmUGUGCm | |
| | | | UGCCUUCUG | CGmCAAmCGCUCU | |
| | | | GCAUCGUU | mGmCCmUmUmCmU | |
| | | | | GGCAUCG*mU*mU | |
| G032798 | 169 | CUGGAGGGU | CUGGAGGGU | mC*mU*mG*mGmAG | chr6: 31356425- |
| | | GUGAGACCC | GUGAGACCC | GmGmUGmUGmAGA | 31356449 |
| | | UGGCCC | UGGCCCGUU | CCmCUGGmCCCmG | |
| | | | GUAGCUCCCU | UUGmUmAmGmCUC | |
| | | | GAAACCGUU | CCmUmGmAmAmAm | |
| | | | GCUACAAUA | CmCGUUmGmCUAm | |
| | | | AGGCCGUCG | CAAU*AAGmGmCC | |
| | | | AAAGAUGUG | mGmUmCmGmAmA | |
| | | | CCGCAACGCU | mAmGmAmUGUGCm | |
| | | | CUGCCUUCUG | CGmCAAmCGCUCU | |
| | | | GCAUCGUU | mGmCCmUmUmCmU | |
| | | | | GGCAUCG*mU*mU | |
| G032799 | 170 | GCCCAGGUCU | GCCCAGGUCU | mG*mC*mC*mCmAG | chr6: 31357087- |
| | | CGGUCAGGG | CGGUCAGGG | GmUmCUmCGmGUC | 31357111 |
| | | CCAGG | CCAGGGUUG | AGmGGCCmAGGmG | |
| | | | UAGCUCCCUG | UUGmUmAmGmCUC | |
| | | | AAACCGUUG | CCmUmGmAmAmAm | |
| | | | CUACAAUAA | CmCGUUmGmCUAm | |
| | | | GGCCGUCGA | CAAU*AAGmGmCC | |
| | | | AAGAUGUGC | mGmUmCmGmAmA | |
| | | | CGCAACGCUC | mAmGmAmUGUGCm | |
| | | | UGCCUUCUG | CGmCAAmCGCUCU | |
| | | | GCAUCGUU | mGmCCmUmUmCmU | |
| | | | | GGCAUCG*mU*mU | |
| G032800 | 171 | CUGUGUGUU | CUGUGUGUU | mC*mU*mG*mUmGU | chr6: 31356763- |
| | | CCGGUCCCAA | CCGGUCCCAA | GmUmUCmCGmGUC | 31356787 |
| | | UACUC | UACUCGUUG | CCmAAUAmCUCmG | |
| | | | UAGCUCCCUG | UUGmUmAmGmCUC | |
| | | | AAACCGUUG | CCmUmGmAmAmAm | |
| | | | CUACAAUAA | CmCGUUmGmCUAm | |
| | | | GGCCGUCGA | CAAU*AAGmGmCC | |
| | | | AAGAUGUGC | mGmUmCmGmAmA | |
| | | | CGCAACGCUC | mAmGmAmUGUGCm | |
| | | | UGCCUUCUG | CGmCAAmCGCUCU | |
| | | | GCAUCGUU | mGmCCmUmUmCmU | |
| | | | | GGCAUCG*mU*mU | |
| G032801 | 172 | UCUGUGUGU | UCUGUGUGU | mU*mC*mU*mGmUG | chr6: 31356762- |
| | | UCCGGUCCCA | UCCGGUCCCA | UmGmUUmCCmGGU | 31356786 |
| | | AUACU | AUACUGUUG | CCmCAAUmACUmG | |
| | | | UAGCUCCCUG | UUGmUmAmGmCUC | |
| | | | AAACCGUUG | CCmUmGmAmAmAm | |
| | | | CUACAAUAA | CmCGUUmGmCUAm | |
| | | | GGCCGUCGA | CAAU*AAGmGmCC | |
| | | | AAGAUGUGC | mGmUmCmGmAmA | |
| | | | CGCAACGCUC | mAmGmAmUGUGCm | |
| | | | UGCCUUCUG | CGmCAAmCGCUCU | |
| | | | GCAUCGUU | mGmCCmUmUmCmU | |
| | | | | GGCAUCG*mU*mU | |
| G032802 | 173 | UGUGUGUUC | UGUGUGUUC | mU*mG*mU*mGmU | chr6: 31356764- |
| | | CGGUCCCAAU | CGGUCCCAAU | GUmUmCCmGGmUC | 31356788 |
| | | ACUCC | ACUCCGUUG | CCAmAUACmUCCm | |
| | | | UAGCUCCCUG | GUUGmUmAmGmCU | |
| | | | AAACCGUUG | CCCmUmGmAmAmA | |
| | | | CUACAAUAA | mCmCGUUmGmCUA | |
| | | | GGCCGUCGA | mCAAU*AAGmGmC | |
| | | | AAGAUGUGC | CmGmUmCmGmAmA | |
| | | | CGCAACGCUC | mAmGmAmUGUGCm | |
| | | | UGCCUUCUG | CGmCAAmCGCUCU | |
| | | | GCAUCGUU | mGmCCmUmUmCmU | |
| | | | | GGCAUCG*mU*mU | |
| G032803 | 174 | CGAACCGUCC | CGAACCGUCC | mC*mG*mA*mAmCC | chr6: 31357116- |
| | | UCCUGCUGCU | UCCUGCUGCU | GmUmCCmUCmCUG | 31357140 |
| | | CUCG | CUCGGUUGU | CUmGCUCmUCGmG | |
| | | | AGCUCCCUGA | UUGmUmAmGmCUC | |
| | | | AACCGUUGC | CCmUmGmAmAmAm | |
| | | | UACAAUAAG | CmCGUUmGmCUAm | |
| | | | GCCGUCGAA | CAAU*AAGmGmCC | |
| | | | AGAUGUGCC | mGmUmCmGmAmA | |
| | | | GCAACGCUCU | mAmGmAmUGUGCm | |
| | | | GCCUUCUGGC | CGmCAAmCGCUCU | |
| | | | AUCGUU | mGmCCmUmUmCmU | |
| | | | | GGCAUCG*mU*mU | |
| G032804 | 175 | UCUGGAGGG | UCUGGAGGG | mU*mC*mU*mGmGA | chr6: 31356424- |
| | | UGUGAGACC | UGUGAGACC | GmGmGUmGUmGAG | 31356448 |
| | | CUGGCC | CUGGCCGUU | ACmCCUGmGCCmG | |
| | | | GUAGCUCCCU | UUGmUmAmGmCUC | |
| | | | GAAACCGUU | CCmUmGmAmAmAm | |
| | | | GCUACAAUA | CmCGUUmGmCUAm | |
| | | | AGGCCGUCG | CAAU*AAGmGmCC | |
| | | | AAAGAUGUG | mGmUmCmGmAmA | |
| | | | CCGCAACGCU | mAmGmAmUGUGCm | |
| | | | | CGmCAAmCGCUCU | |
| | | | CUGCCUUCUG | mGmCCmUmUmCmU | |
| | | | GCAUCGUU | GGCAUCG*mU*mU | |
| G032805 | 176 | CCCAGAGCCG | CCCAGAGCCG | mC*mC*mC*mAmGA | chr6: 31355204- |
| | | UCUUCCCAGU | UCUUCCCAGU | GmCmCGmUCmUUC | 31355228 |
| | | CCAC | CCACGUUGU | CCmAGUCmCACmG | |
| | | | AGCUCCCUGA | UUGmUmAmGmCUC | |
| | | | AACCGUUGC | CCmUmGmAmAmAm | |
| | | | UACAAUAAG | CmCGUUmGmCUAm | |
| | | | GCCGUCGAA | CAAU*AAGmGmCC | |
| | | | AGAUGUGCC | mGmUmCmGmAmA | |
| | | | GCAACGCUCU | mAmGmAmUGUGCm | |
| | | | GCCUUCUGGC | CGmCAAmCGCUCU | |
| | | | AUCGUU | mGmCCmUmUmCmU | |
| | | | | GGCAUCG*mU*mU | |
| G032806 | 177 | UCCCAGAGCC | UCCCAGAGCC | mU*mC*mC*mCmAG | chr6: 31355205- |
| | | GUCUUCCCAG | GUCUUCCCAG | AmGmCCmGUmCUU | 31355229 |
| | | UCCA | UCCAGUUGU | CCmCAGUmCCAmG | |
| | | | AGCUCCCUGA | UUGmUmAmGmCUC | |
| | | | AACCGUUGC | CCmUmGmAmAmAm | |
| | | | UACAAUAAG | CmCGUUmGmCUAm | |
| | | | GCCGUCGAA | CAAU*AAGmGmCC | |
| | | | AGAUGUGCC | mGmUmCmGmAmA | |
| | | | GCAACGCUCU | mAmGmAmUGUGCm | |
| | | | GCCUUCUGGC | CGmCAAmCGCUCU | |
| | | | AUCGUU | mGmCCmUmUmCmU | |
| | | | | GGCAUCG*mU*mU | |
| G032807 | 178 | CCAGAGCCGU | CCAGAGCCGU | mC*mC*mA*mGmAG | chr6: 31355203- |
| | | CUUCCCAGUC | CUUCCCAGUC | CmCmGUmCUmUCC | 31355227 |
| | | CACC | CACCGUUGU | CAmGUCCmACCmG | |
| | | | AGCUCCCUGA | UUGmUmAmGmCUC | |
| | | | AACCGUUGC | CCmUmGmAmAmAm | |
| | | | UACAAUAAG | CmCGUUmGmCUAm | |
| | | | GCCGUCGAA | CAAU*AAGmGmCC | |
| | | | AGAUGUGCC | mGmUmCmGmAmA | |
| | | | GCAACGCUCU | mAmGmAmUGUGCm | |
| | | | GCCUUCUGGC | CGmCAAmCGCUCU | |
| | | | AUCGUU | mGmCCmUmUmCmU | |
| | | | | GGCAUCG*mU*mU | |
| G032808 | 179 | GUGUUCCGG | GUGUUCCGG | mG*mU*mG*mUmUC | chr6: 31356767- |
| | | UCCCAAUACU | UCCCAAUACU | CmGmGUmCCmCAA | 31356791 |
| | | CCGGC | CCGGCGUUG | UAmCUCCmGGCmG | |
| | | | UAGCUCCCUG | UUGmUmAmGmCUC | |
| | | | AAACCGUUG | CCmUmGmAmAmAm | |
| | | | CUACAAUAA | CmCGUUmGmCUAm | |
| | | | GGCCGUCGA | CAAU*AAGmGmCC | |
| | | | AAGAUGUGC | mGmUmCmGmAmA | |
| | | | CGCAACGCUC | mAmGmAmUGUGCm | |
| | | | UGCCUUCUG | CGmCAAmCGCUCU | |
| | | | GCAUCGUU | mGmCCmUmUmCmU | |
| | | | | GGCAUCG*mU*mU | |
| G032809 | 180 | UGGAGGGUG | UGGAGGGUG | mU*mG*mG*mAmG | chr6: 31356426- |
| | | UGAGACCCU | UGAGACCCU | GGmUmGUmGAmGA | 31356450 |
| | | GGCCCC | GGCCCCGUUG | CCCmUGGCmCCCm | |
| | | | UAGCUCCCUG | GUUGmUmAmGmCU | |
| | | | AAACCGUUG | CCCmUmGmAmAmA | |
| | | | CUACAAUAA | mCmCGUUmGmCUA | |
| | | | GGCCGUCGA | mCAAU*AAGmGmC | |
| | | | AAGAUGUGC | CmGmUmCmGmAmA | |
| | | | CGCAACGCUC | mAmGmAmUGUGCm | |
| | | | UGCCUUCUG | CGmCAAmCGCUCU | |
| | | | GCAUCGUU | mGmCCmUmUmCmU | |
| | | | | GGCAUCG*mU*mU | |
| G032810 | 181 | CCGGCCCCUC | CCGGCCCCUC | mC*mC*mG*mGmCC | chr6: 31356786- |
| | | CUGCUCUAUC | CUGCUCUAUC | CmCmUCmCUmGCU | 31356810 |
| | | CACG | CACGGUUGU | CUmAUCCmACGmG | |
| | | | AGCUCCCUGA | UUGmUmAmGmCUC | |
| | | | AACCGUUGC | CCmUmGmAmAmAm | |
| | | | UACAAUAAG | CmCGUUmGmCUAm | |
| | | | GCCGUCGAA | CAAU*AAGmGmCC | |
| | | | AGAUGUGCC | mGmUmCmGmAmA | |
| | | | GCAACGCUCU | mAmGmAmUGUGCm | |
| | | | GCCUUCUGGC | CGmCAAmCGCUCU | |
| | | | AUCGUU | mGmCCmUmUmCmU | |
| | | | | GGCAUCG*mU*mU | |
| G032811 | 182 | UCCCACUUGC | UCCCACUUGC | mU*mC*mC*mCmAC | chr6: 31356270- |
| | | GCUGGGUGA | GCUGGGUGA | UmUmGCmGCmUGG | 31356294 |
| | | UCUGA | UCUGAGUUG | GUmGAUCmUGAmG | |
| | | | UAGCUCCCUG | UUGmUmAmGmCUC | |
| | | | AAACCGUUG | CCmUmGmAmAmAm | |
| | | | CUACAAUAA | CmCGUUmGmCUAm | |
| | | | GGCCGUCGA | CAAU*AAGmGmCC | |
| | | | AAGAUGUGC | mGmUmCmGmAmA | |
| | | | CGCAACGCUC | mAmGmAmUGUGCm | |
| | | | UGCCUUCUG | CGmCAAmCGCUCU | |
| | | | GCAUCGUU | mGmCCmUmUmCmU | |
| | | | | GGCAUCG*mU*mU | |
| G032812 | 183 | CACAGACUG | CACAGACUG | mC*mA*mC*mAmGA | chr6: 31356723- |
| | | ACCGAGAGA | ACCGAGAGA | CmUmGAmCCmGAG | 31356747 |
| | | GCCUGC | GCCUGCGUU | AGmAGCCmUGCmG | |
| | | | GUAGCUCCCU | UUGmUmAmGmCUC | |
| | | | GAAACCGUU | CCmUmGmAmAmAm | |
| | | | GCUACAAUA | CmCGUUmGmCUAm | |
| | | | AGGCCGUCG | CAAU*AAGmGmCC | |
| | | | AAAGAUGUG | mGmUmCmGmAmA | |
| | | | CCGCAACGCU | mAmGmAmUGUGCm | |
| | | | CUGCCUUCUG | CGmCAAmCGCUCU | |
| | | | GCAUCGUU | mGmCCmUmUmCmU | |
| | | | | GGCAUCG*mU*mU | |
| G032813 | 184 | UGCUGGUCA | UGCUGGUCA | mU*mG*mC*mUmGG | chr6: 31357133- |
| | | UGGCGCCCCG | UGGCGCCCCG | UmCmAUmGGmCGC | 31357157 |
| | | AACCG | AACCGGUUG | CCmCGAAmCCGmG | |
| | | | UAGCUCCCUG | UUGmUmAmGmCUC | |
| | | | AAACCGUUG | CCmUmGmAmAmAm | |
| | | | CUACAAUAA | CmCGUUmGmCUAm | |
| | | | GGCCGUCGA | CAAU*AAGmGmCC | |
| | | | AAGAUGUGC | mGmUmCmGmAmA | |
| | | | CGCAACGCUC | mAmGmAmUGUGCm | |
| | | | UGCCUUCUG | CGmCAAmCGCUCU | |
| | | | GCAUCGUU | mGmCCmUmUmCmU | |
| | | | | GGCAUCG*mU*mU | |
| G028919 | 185 | CACAUCAGA | CACAUCAGA | mC*mA*mC*mAmUC | chr6: 31354497- |
| | | GCCCUGGGCA | GCCCUGGGCA | AmGmAGmCCmCUG | 31354521 |
| | | CUGUC | CUGUCGUUG | GGmCACUmGUCmG | |
| | | | UAGCUCCCUG | UUGmUmAmGmCUC | |
| | | | AAACCGUUG | CCmUmGmAmAmAm | |
| | | | CUACAAUAA | CmCGUUmGmCUAm | |
| | | | GGCCGUCGA | CAAU*AAGmGmCC | |
| | | | AAGAUGUGC | mGmUmCmGmAmA | |
| | | | CGCAACGCUC | mAmGmAmUGUGCm | |
| | | | UGCCUUCUG | CGmCAAmCGCUCU | |
| | | | GCAUCGUU | mGmCCmUmUmCmU | |
| | | | | GGCAUCG*mU*mU | |

*The guide sequence disclosed in this Table may be unmodified, modified with the exemplary
modification pattern shown in the Table, or modified with a different modification pattern
disclosed herein or available in the art.

TABLE 3A
Additional Exemplary N. meningitidis (Nme) HLA-B guide RNAs

| | | Exemplary Guide RNA Modified Sequence |
|---|---|---|
| Guide ID | Guide Sequence | (SEQ ID NOs: 2186-2191) |
| G034206 | CAAACUCAG | mC*mA*mA*mAmCUCmAmGGmACmACUGAmGCUUmGUGmGUUGm |
| | GACACUGAG | UmAmGmCUCCCmUmGmAmAmAmCmCGUUmGmCUAmCAAUAAGm |
| | CUUGUG (SEQ | GmCCmGmUmCmGmAmAmAmGmAmUGUGCmCGmCAAmCGCUCUm |
| | ID NO: 163) | GmCCmUmUmCmUGGCAUCG*mU*mU (SEQ ID NO: 2186) |
| G034207 | UCAGGACAC | mU*mC*mA*mGmGACmAmCUmGAmGCUUGmUGGAmGACmGUUGm |
| | UGAGCUUGU | UmAmGmCUCCCmUmGmAmAmAmCmCGUUmGmCUAmCAAUAAGm |
| | GGAGAC (SEQ | GmCCmGmUmCmGmAmAmAmGmAmUGUGCmCGmCAAmCGCUCUm |
| | ID NO: 164) | GmCCmUmUmCmUGGCAUCG*mU*mU (SEQ ID NO: 2187) |
| G034208 | UCUGGGAAA | mU*mC*mU*mGmGGAmAmAGmGAmGGGGAmAGAUmGAGmGUUG |
| | GGAGGGGAA | mUmAmGmCUCCCmUmGmAmAmAmCmCGUUmGmCUAmCAAUAAG |
| | GAUGAG (SEQ | mGmCCmGmUmCmGmAmAmAmGmAmUGUGCmCGmCAAmCGCUCU |
| | ID NO: 165) | mGmCCmUmUmCmUGGCAUCG*mU*mU (SEQ ID NO: 2188) |
| G034209 | CUCUGGGAA | mC*mU*mC*mUmGGGmAmAAmGGmAGGGGmAAGAmUGAmGUUGm |
| | AGGAGGGGA | UmAmGmCUCCCmUmGmAmAmAmCmCGUUmGmCUAmCAAUAAGm |
| | AGAUGA (SEQ | GmCCmGmUmCmGmAmAmAmGmAmUGUGCmCGmCAAmCGCUCUm |
| | ID NO: 166) | GmCCmUmUmCmUGGCAUCG*mU*mU (SEQ ID NO: 2189) |
| G034210 | CUGGAGGGU | mC*mU*mG*mGmAGGmGmUGmUGmAGACCmCUGGmCCCmGUUGm |
| | GUGAGACCC | UmAmGmCUCCCmUmGmAmAmAmCmCGUUmGmCUAmCAAUAAGm |
| | UGGCCC (SEQ | GmCCmGmUmCmGmAmAmAmGmAmUGUGCmCGmCAAmCGCUCUm |
| | ID NO: 169) | GmCCmUmUmCmUGGCAUCG*mU*mU (SEQ ID NO: 2190) |
| G034211 | UCCCAGAGCC | mU*mC*mC*mCmAGAmGmCCmGUmCUUCCmCAGUmCCAmGUUGm |
| | GUCUUCCCAG | UmAmGmCUCCCmUmGmAmAmAmCmCGUUmGmCUAmCAAUAAGm |
| | UCCA (SEQ ID | GmCCmGmUmCmGmAmAmAmGmAmUGUGCmCGmCAAmCGCUCUm |
| | NO: 177) | GmCCmUmUmCmUGGCAUCG*mU*mU (SEQ ID NO: 2191) |

*The guide sequence disclosed in this Table may be unmodified, modified with
the exemplary modification pattern shown in the Table, or modified with a
different modification pattern disclosed herein or available in the art.

[0585] In some embodiments, the HLA-B gRNA comprises a guide sequence selected from any one of SEQ ID NOs: 1-91. In some embodiments, the HLA-B gRNA comprises a guide sequence selected from any one of SEQ ID NOs: 3, 13, 18, 32, 36, 39, 48-56, 58, 64-71, 73-73, 80-82, 86, and 88-91. In some embodiments, the HLA-B gRNA comprises a guide sequence selected from any one of SEQ ID NOs: 3, 13, 36, 39, 49-56, 64-71, 74, 80-82, 88, and 90-91. In some embodiments, the HLA-B gRNA comprises a guide sequence selected from any one of SEQ ID NOs: 13, 39, 49, 52, 65, 74, 82, and 91. In some embodiments, the HLA-B gRNA comprises a guide sequence selected from any one of SEQ ID NOs: 3, 39, and 49-52. In some embodiments, the HLA-B gRNA comprises a guide sequence selected from any one of SEQ ID NOs: 3, 36, 39, 49, 50, 51, and 52. In some embodiments, the HLA-B gRNA comprises a guide sequence selected from any one of SEQ ID NOs: 39, 49, and 52. In some embodiments, the HLA-B gRNA comprises a guide sequence selected from any one of SEQ ID NOs: 49, 52-54, 55, 56, 64, 65, 67-71, 73-74, 80-82, and 90. In some embodiments, the HLA-B gRNA comprises a guide sequence selected from any one of SEQ ID NOs: 49, 51, 74, 81, and 82. In some embodiments, the HLA-B gRNA comprises a guide sequence of SEQ ID NO: 13 or 74. In some embodiments, the HLA-B gRNA comprises a guide sequence of SEQ ID NO: 13. In some embodiments, the HLA-B gRNA comprises a guide sequence of SEQ ID NO: 74.

[0586] In some embodiments, the HLA-B gRNA comprises a guide sequence selected from any one of SEQ ID NOs: 101-185. In some embodiments, the HLA-B gRNA comprises a guide sequence selected from any one of SEQ ID NOs: 101, 103, 106, 107, 114, 117, 118, 125-129,137,138, 141, 143, 144, 145, 159, 160, 163, 164, 165, 166, 169, 171, 172, 173, 176, 177, 178, 179, and 180. In some embodiments, the HLA-B gRNA comprises a guide sequence selected from any one of SEQ ID NOs: 65 and 74. In some embodiments, the HLA-B gRNA comprises a guide sequence selected from any one of SEQ ID NOs: 49, 52-54, 56, 64-65, 67-71, 73-74, 80-82, 88, and 90-91. In some embodiments, the HLA-B gRNA comprises a guide sequence selected from any one of SEQ ID NOs: 74, 82, and 91.

[0587] In some embodiments, the gRNA comprises a guide sequence selected from any one of SEQ ID NOs: 1-91 or 101-185. In some embodiments, the gRNA comprises a guide sequence selected from any one of SEQ ID NOs: 101, 103, 106, 107, 117, 125-129, 137, 138, 141, 143, 144, 145, 159, 160, 163, 164, 165, 166, 169, 171, 172, 173, 176, 177, 178, 179, and 180. In some embodiments, the gRNA comprises a guide sequence selected from any one of SEQ ID NOs: 101, 103, 106, 117, 118, 125-128, 133, 137-138, 141, 143-144, 159, 163, 164, 165, 166, 169, 171, 173, 177, 178, and 180. In some embodiments, the gRNA comprises a guide sequence selected from any one of SEQ ID NOs: 101, 106, 114, 117-118, 125-128, 133, 137-138, 141, 143-144, 159, 163, 164, 165, 166, 169, 171, 173, 177, 178, and 180. In some embodiments, the gRNA comprises a guide sequence selected from any one of SEQ ID NOs: 101, 117-118, 125-128, 137-138, 144, 159, 163, 164, 165, 166, 169, 177, 178, and 180. In some embodiments, the gRNA comprises a guide sequence selected from any one of SEQ ID NOs: 101, 117, 127, 137-138, 163, 164, 165, 166, 169, and 177. In some embodiments, the gRNA comprises a guide sequence selected from any one of SEQ ID NOs: 163-166, 169, and 177. In some embodiments, the gRNA comprises a sequence selected from any one of SEQ ID NOs: 2186-2191. In some embodiments, the gRNA comprises a guide sequence comprising a sequence of SEQ ID NO: 163. In some embodiments, the gRNA comprises a guide sequence comprising a sequence of SEQ ID NO: 164. In some embodiments, the gRNA comprises a guide sequence comprising a sequence of SEQ ID NO: 165. In some embodiments, the gRNA comprises a guide sequence comprising a sequence of SEQ ID NO: 166. In some embodiments, the gRNA comprises a guide sequence comprising a sequence of SEQ ID NO: 169. In some embodiments, the gRNA comprises a guide sequence comprising a sequence of SEQ ID NO: 177.

[0588] In some embodiments, the HLA-B guide RNA comprises a guide sequence that is at least 17, 18, 19, 20, 21, 22, 23, or 24 contiguous nucleotides of a sequence selected from SEQ ID NOs: 1-91 or 101-185. In some embodiments, the HLA-B guide RNA comprises a guide sequence that is at least 95%, 90%, 85%, 80%, 75%, or 70% identical to a sequence selected from SEQ ID NOs: 1-91 or 101-185. In some embodiments, the HLA-B guide RNA comprises a guide sequence that is at least 95% identical to a sequence selected from SEQ ID NOs: 1-91 or 101-185.

[0589] In some embodiments, the HLA-B guide RNA comprises a guide sequence that comprises at least 10 contiguous nucleotides ±10 nucleotides of a genomic coordinate listed in Tables 2-3. As used herein, at least 10 contiguous nucleotides ±10 nucleotides of a genomic coordinate means, for example, at least 10 contiguous nucleotides within the genomic coordinates wherein the genomic coordinates include 10 nucleotides in the 5′ direction and 10 nucleotides in the 3′ direction from the ranges listed in Tables 2-3. For example, an HLA-B guide RNA may comprise 10 contiguous nucleotides within the genomic coordinates (a) chr6:31355348-31355368; or (b) chr6:31355390-31355414; chr6:31355417-31355441; or chr6: 31356386-31356410, including the boundary nucleotides of these ranges. In some embodiments, the HLA-B guide RNA comprises a guide sequence that is at least 17, 18, 19, or 20 contiguous nucleotides of a sequence that comprises 10 contiguous nucleotides ±10 nucleotides of a genomic coordinate listed in Table 2, or a guide sequence that is complementary to at least 17, 18, 19, 20, 21, 22, 23, or 24 contiguous nucleotides of a sequence that comprises 10 contiguous nucleotides ±10 nucleotides of a genomic coordinate listed in Table 3. In some embodiments, the HLA-B guide RNA comprises a guide sequence that is at least 95%, 90%, or 85% identical to a sequence selected from a sequence that is 17, 18, 19, or 20 contiguous nucleotides of a sequence that comprises 10 contiguous nucleotides ±10 nucleotides of a genomic coordinate listed in Table 2, or a guide sequence that is complementary to at least 17, 18, 19, 20, 21, 22, 23, or 24 contiguous nucleotides of a sequence that comprises 10 contiguous nucleotides ±10 nucleotides of a genomic coordinate listed in Table 3.

[0590] In some embodiments, the Tables 2-3 guide RNA comprises a guide sequence that comprises at least 15 contiguous nucleotides ±10 nucleotides of a genomic coordinate listed in Tables 2-3. In some embodiments, the HLA-B guide RNA comprises a guide sequence that comprises at least 20 contiguous nucleotides ±10 nucleotides of a genomic coordinate listed in Tables 2-3. In some embodiments, the HLA-B guide RNA comprises SEQ ID NO: 1. In some embodiments, the HLA-B guide RNA comprises SEQ ID NO: 2. In some embodiments, the HLA-B guide RNA comprises SEQ ID NO: 3. In some embodiments, the HLA-B guide RNA comprises SEQ ID NO: 4. In some embodiments, the HLA-B guide RNA comprises SEQ ID NO: 5. In some embodiments, the HLA-B guide RNA comprises SEQ ID NO: 6. In some embodiments, the HLA-B guide RNA comprises SEQ ID NO: 7. In some embodiments, the HLA-B guide RNA comprises SEQ ID NO: 8. In some embodiments, the HLA-B guide RNA comprises SEQ ID NO: 9. In some embodiments, the HLA-B guide RNA comprises SEQ ID NO: 10. In some embodiments, the HLA-A guide RNA comprises SEQ ID NO: 11. In some embodiments, the HLA-B guide RNA comprises SEQ ID NO: 12. In some embodiments, the HLA-B guide RNA comprises SEQ ID NO: 13. In some embodiments, the HLA-B guide RNA comprises SEQ ID NO: 14. In some embodiments, the HLA-B guide RNA comprises SEQ ID NO: 15. In some embodiments, the HLA-B guide RNA comprises SEQ ID NO: 16. In some embodiments, the HLA-B guide RNA comprises SEQ ID NO: 17. In some embodiments, the HLA-B guide RNA comprises SEQ ID NO: 18. In some embodiments, the HLA-B guide RNA comprises SEQ ID NO: 19. In some embodiments, the HLA-B guide RNA comprises SEQ ID NO: 20. In some embodiments, the HLA-B guide RNA comprises SEQ ID NO: 21. In some embodiments, the HLA-B guide RNA comprises SEQ ID NO: 22. In some embodiments, the HLA-B guide RNA comprises SEQ ID NO: 23. In some embodiments, the HLA-B guide RNA comprises SEQ ID NO: 24. In some embodiments, the HLA-B guide RNA comprises SEQ ID NO: 25. In some embodiments, the HLA-B guide RNA comprises SEQ ID NO: 26. In some embodiments, the HLA-B guide RNA comprises SEQ ID NO: 27. In some embodiments, the HLA-B guide RNA comprises SEQ ID NO: 28. In some embodiments, the HLA-B guide RNA comprises SEQ ID NO: 29. In some embodiments, the HLA-B guide RNA comprises SEQ ID NO: 30. In some embodiments, the HLA-B guide RNA comprises SEQ ID NO: 31. In some embodiments, the HLA-B guide RNA comprises SEQ ID NO: 32. In some embodiments, the HLA-B guide RNA comprises SEQ ID NO: 33. In some embodiments, the HLA-B guide RNA comprises SEQ ID NO: 34. In some embodiments, the HLA-B guide RNA comprises SEQ ID NO: 35. In some embodiments, the HLA-B guide RNA comprises SEQ ID NO: 36. In some embodiments, the HLA-B guide RNA comprises SEQ ID NO: 37. In some embodiments, the HLA-B guide RNA comprises SEQ ID NO: 38. In some embodiments, the HLA-B guide RNA comprises SEQ ID NO: 39. In some embodiments, the HLA-B guide RNA comprises SEQ ID NO: 40. In some embodiments, the HLA-B guide RNA comprises SEQ ID NO: 41. In some embodiments, the HLA-B guide RNA comprises SEQ ID NO: 42. In some embodiments, the HLA-B guide RNA comprises SEQ ID NO: 43. In some embodiments, the HLA-B guide RNA comprises SEQ ID NO: 44. In some embodiments, the HLA-B guide RNA comprises SEQ ID NO: 45. In some embodiments, the HLA-B guide RNA comprises SEQ ID NO: 46. In some embodiments, the HLA-B guide RNA comprises SEQ ID NO: 47. In some embodiments, the HLA-B guide RNA comprises SEQ ID NO: 48. In some embodiments, the HLA-B guide RNA comprises SEQ ID NO: 49. In some embodiments, the HLA-B guide RNA comprises SEQ ID NO: 50. In some embodiments, the HLA-B guide RNA comprises SEQ ID NO: 51. In some embodiments, the HLA-B guide RNA comprises SEQ ID NO: 52. In some embodiments, the HLA-B guide RNA comprises SEQ ID NO: 53. In some embodiments, the HLA-B guide RNA comprises SEQ ID NO: 54. In some embodiments, the HLA-B guide RNA comprises SEQ ID NO: 55. In some embodiments, the HLA-B guide RNA comprises SEQ ID NO: 56. In some embodiments, the HLA-B guide RNA comprises SEQ ID NO: 57. In some embodiments, the HLA-B guide RNA comprises SEQ ID NO: 58. In some embodiments, the HLA-B guide RNA comprises SEQ ID NO: 59. In some embodiments, the HLA-B guide RNA comprises SEQ ID NO: 60. In some embodiments, the HLA-B guide RNA comprises SEQ ID NO: 61. In some embodiments, the HLA-B guide RNA comprises SEQ ID NO: 62. In some embodiments, the HLA-B guide RNA comprises SEQ ID NO: 63. In some embodiments, the HLA-B guide RNA comprises SEQ ID NO: 64. In some embodiments, the HLA-B guide RNA comprises SEQ ID NO: 65. In some embodiments, the HLA-B guide RNA comprises SEQ ID NO: 66. In some embodiments, the HLA-B guide RNA comprises SEQ ID NO: 67. In some embodiments, the HLA-B guide RNA comprises SEQ ID NO: 68. In some embodiments, the HLA-B guide RNA comprises SEQ ID NO: 69. In some embodiments, the HLA-B guide RNA comprises SEQ ID NO: 70. In some embodiments, the HLA-B guide RNA comprises SEQ ID NO: 71. In some embodiments, the HLA-B guide RNA comprises SEQ ID NO: 72. In some embodiments, the HLA-B guide RNA comprises SEQ ID NO: 73. In some embodiments, the HLA-B guide RNA comprises SEQ ID NO: 74. In some embodiments, the HLA-B guide RNA comprises SEQ ID NO: 75. In some embodiments, the HLA-B guide RNA comprises SEQ ID NO: 76. In some embodiments, the HLA-B guide RNA comprises SEQ ID NO: 77. In some embodiments, the HLA-B guide RNA comprises SEQ ID NO: 78. In some embodiments, the HLA-B guide RNA comprises SEQ ID NO: 79. In some embodiments, the HLA-B guide RNA comprises SEQ ID NO: 80. In some embodiments, the HLA-B guide RNA comprises SEQ ID NO: 81. In some embodiments, the HLA-B guide RNA comprises SEQ ID NO: 82. In some embodiments, the HLA-B guide RNA comprises SEQ ID NO: 83. In some embodiments, the HLA-B guide RNA comprises SEQ ID NO: 84. In some embodiments, the HLA-B guide RNA comprises SEQ ID NO: 85. In some embodiments, the HLA-B guide RNA comprises SEQ ID NO: 86. In some embodiments, the HLA-B guide RNA comprises SEQ ID NO: 87. In some embodiments, the HLA-B guide RNA comprises SEQ ID NO: 88. In some embodiments, the HLA-B guide RNA comprises SEQ ID NO: 89. In some embodiments, the HLA-B guide RNA comprises SEQ ID NO: 90. In some embodiments, the HLA-B guide RNA comprises SEQ ID NO: 91.

[0591] In some embodiments, the HLA-B guide RNA comprises SEQ ID NO: 101. In some embodiments, the HLA-B guide RNA comprises SEQ ID NO: 102. In some embodiments, the HLA-B guide RNA comprises SEQ ID NO: 103. In some embodiments, the HLA-B guide RNA comprises SEQ ID NO: 104. In some embodiments, the HLA-B guide RNA comprises SEQ ID NO: 105. In some embodiments, the HLA-B guide RNA comprises SEQ ID NO: 106. In some embodiments, the HLA-B guide RNA comprises SEQ ID NO: 107. In some embodiments, the HLA-B guide RNA comprises SEQ ID NO: 108. In some embodiments, the HLA-B guide RNA comprises SEQ ID NO: 109. In some embodiments, the HLA-B guide RNA comprises SEQ ID NO: 110. In some embodiments, the HLA-B guide RNA comprises SEQ ID NO: 111. In some embodiments, the HLA-B guide RNA comprises SEQ ID NO: 112. In some embodiments, the HLA-B guide RNA comprises SEQ ID NO: 113. In some embodiments, the HLA-B guide RNA comprises SEQ ID NO: 114. In some embodiments, the HLA-B guide RNA comprises SEQ ID NO: 115. In some embodiments, the HLA-B guide RNA comprises SEQ ID NO: 116. In some embodiments, the HLA-B guide RNA comprises SEQ ID NO: 117. In some embodiments, the HLA-B guide RNA comprises SEQ ID NO: 118. In some embodiments, the HLA-B guide RNA comprises SEQ ID NO: 119. In some embodiments, the HLA-B guide RNA comprises SEQ ID NO: 120. In some embodiments, the HLA-B guide RNA comprises SEQ ID NO: 121. In some embodiments, the HLA-B guide RNA comprises SEQ ID NO: 122. In some embodiments, the HLA-B guide RNA comprises SEQ ID NO: 123. In some embodiments, the HLA-B guide RNA comprises SEQ ID NO: 124. In some embodiments, the HLA-B guide RNA comprises SEQ ID NO: 125. In some embodiments, the HLA-B guide RNA comprises SEQ ID NO: 126. In some embodiments, the HLA-B guide RNA comprises SEQ ID NO: 127. In some embodiments, the HLA-B guide RNA comprises SEQ ID NO: 128. In some embodiments, the HLA-B guide RNA comprises SEQ ID NO: 129. In some embodiments, the HLA-B guide RNA comprises SEQ ID NO: 130. In some embodiments, the HLA-B guide RNA comprises SEQ ID NO: 131. In some embodiments, the HLA-B guide RNA comprises SEQ ID NO: 132. In some embodiments, the HLA-B guide RNA comprises SEQ ID NO: 133. In some embodiments, the HLA-B guide RNA comprises SEQ ID NO: 134. In some embodiments, the HLA-B guide RNA comprises SEQ ID NO: 135. In some embodiments, the HLA-B guide RNA comprises SEQ ID NO: 136. In some embodiments, the HLA-B guide RNA comprises SEQ ID NO: 137. In some embodiments, the HLA-B guide RNA comprises SEQ ID NO: 138. In some embodiments, the HLA-B guide RNA comprises SEQ ID NO: 139. In some embodiments, the HLA-B guide RNA comprises SEQ ID NO: 140. In some embodiments, the HLA-B guide RNA comprises SEQ ID NO: 141. In some embodiments, the HLA-B guide RNA comprises SEQ ID NO: 142. In some embodiments, the HLA-B guide RNA comprises SEQ ID NO: 143. In some embodiments, the HLA-B guide RNA comprises SEQ ID NO: 144. In some embodiments, the HLA-B guide RNA comprises SEQ ID NO: 145. In some embodiments, the HLA-B guide RNA comprises SEQ ID NO: 146. In some embodiments, the HLA-B guide RNA comprises SEQ ID NO: 147. In some embodiments, the HLA-B guide RNA comprises SEQ ID NO: 148. In some embodiments, the HLA-B guide RNA comprises SEQ ID NO: 149. In some embodiments, the HLA-B guide RNA comprises SEQ ID NO: 150. In some embodiments, the HLA-B guide RNA comprises SEQ ID NO: 151. In some embodiments, the HLA-B guide RNA comprises SEQ ID NO: 152. In some embodiments, the HLA-B guide RNA comprises SEQ ID NO: 153. In some embodiments, the HLA-B guide RNA comprises SEQ ID NO: 154. In some embodiments, the HLA-B guide RNA comprises SEQ ID NO: 155. In some embodiments, the HLA-B guide RNA comprises SEQ ID NO: 156. In some embodiments, the HLA-B guide RNA comprises SEQ ID NO: 157. In some embodiments, the HLA-B guide RNA comprises SEQ ID NO: 158. In some embodiments, the HLA-B guide RNA comprises SEQ ID NO: 159. In some embodiments, the HLA-B guide RNA comprises SEQ ID NO: 160. In some embodiments, the HLA-B guide RNA comprises SEQ ID NO: 161. In some embodiments, the HLA-B guide RNA comprises SEQ ID NO: 162. In some embodiments, the HLA-B guide RNA comprises SEQ ID NO: 163. In some embodiments, the HLA-B guide RNA comprises SEQ ID NO: 164. In some embodiments, the HLA-B guide RNA comprises SEQ ID NO: 165. In some embodiments, the HLA-B guide RNA comprises SEQ ID NO: 166. In some embodiments, the HLA-B guide RNA comprises SEQ ID NO: 167. In some embodiments, the HLA-B guide RNA comprises SEQ ID NO: 168. In some embodiments, the HLA-B guide RNA comprises SEQ ID NO: 169. In some embodiments, the HLA-B guide RNA comprises SEQ ID NO: 170. In some embodiments, the HLA-B guide RNA comprises SEQ ID NO: 171. In some embodiments, the HLA-B guide RNA comprises SEQ ID NO: 172. In some embodiments, the HLA-B guide RNA comprises SEQ ID NO: 173. In some embodiments, the HLA-B guide RNA comprises SEQ ID NO: 174. In some embodiments, the HLA-B guide RNA comprises SEQ ID NO: 175. In some embodiments, the HLA-B guide RNA comprises SEQ ID NO: 176. In some embodiments, the HLA-B guide RNA comprises SEQ ID NO: 177. In some embodiments, the HLA-B guide RNA comprises SEQ ID NO: 178. In some embodiments, the HLA-B guide RNA comprises SEQ ID NO: 179. In some embodiments, the HLA-B guide RNA comprises SEQ ID NO: 180. In some embodiments, the HLA-B guide RNA comprises SEQ ID NO: 181. In some embodiments, the HLA-B guide RNA comprises SEQ ID NO: 182. In some embodiments, the HLA-B guide RNA comprises SEQ ID NO: 183. In some embodiments, the HLA-B guide RNA comprises SEQ ID NO: 184. In some embodiments, the HLA-B guide RNA comprises SEQ ID NO: 185. In some embodiments, the HLA-B guide RNA comprises SEQ ID NO: 2186. In some embodiments, the HLA-B guide RNA comprises SEQ ID NO: 2187. In some embodiments, the HLA-B guide RNA comprises SEQ ID NO: 2188. In some embodiments, the HLA-B guide RNA comprises SEQ ID NO: 2189. In some embodiments, the HLA-B guide RNA comprises SEQ ID NO: 2190. In some embodiments, the HLA-B guide RNA comprises SEQ ID NO: 2191.

[0592] Additional embodiments of HLA-B guide RNAs are provided herein, including e.g., exemplary modifications to the guide RNA. 2. Genetic modifications to HLA-B

[0593] In some embodiments, the methods and compositions disclosed herein genetically modify at least one nucleotide in the HLA-B gene in a cell. Genetic modifications encompass the population of modifications that results from contact with a gene editing system (e.g., the population of edits that result from Cas9 and an HLA-B guide RNA, or the population of edits that result from BC22 and an HLA-B guide RNA).

[0594] In some embodiments, the genetic modification comprises at least one nucleotide within the genomic coordinates chosen from: (a) chr6: 31355182-31355596 or (b) chr6:31355203-31356461.

[0595] In some embodiments, the genetic modification comprises at least one nucleotide within the genomic coordinates chosen from: chr6:31355182-31355202; chr6:31355348-31355368; chr6:31355145-31355165; chr6:31355349-31355369; chr6:31356381-31356401; chr6:31356380-31356400; chr6:31355204-31355224; chr6:31355205-31355225; chr6:31355191-31355211; chr6:31355192-31355212; chr6:31355193-31355213; chr6:31355198-31355218; chr6:31355320-31355340; chr6:31355319-31355339; chr6:31355347-31355367; chr6:31355432-31355452; chr6:31355340-31355360; chr6:31355410-31355430; chr6:31355414-31355434; or chr6:31355409-31355429.

[0596] In some embodiments, the genetic modification comprises at least one nucleotide within the genomic coordinates chosen from: chr6:31355182-31355202; chr6:31355349-31355369; chr6:31355348-31355368; or chr6:31355145-31355165.

[0597] In some embodiments, the genetic modification comprises at least one nucleotide within the genomic coordinates chosen from: chr6:31355348-31355368; chr6:31355349-31355369; chr6:31356381-31356401; chr6:31356380-31356400; chr6:31355204-31355224; chr6:31355205-31355225; chr6:31355191-31355211; chr6:31355192-31355212; chr6:31355193-31355213; chr6:31355198-31355218; chr6:31355320-31355340; chr6:31355319-31355339; chr6:31355182-31355202; chr6:31355178-31355198; chr6:31355347-31355367; chr6:31355145-31355165; chr6:31355432-31355452; chr6:31355340-31355360; or chr6:31355414-31355434.

[0598] In some embodiments, the genetic modification comprises at least one nucleotide within the genomic coordinates chosen from: chr6:31355348-31355368; chr6:31355349-31355369; chr6:31356381-31356401; chr6:31356380-31356400; chr6:31355205-31355225; chr6:31355191-31355211; chr6:31355192-31355212; chr6:31355193-31355213; chr6:31355198-31355218; chr6:31355320-31355340; chr6:31355319-31355339; chr6:31355182-31355202; chr6:31355178-31355198; chr6:31355347-31355367; chr6:31355145-31355165; chr6:31355432-31355452; chr6:31355340-31355360; chr6:31355410-31355430; chr6:31355414-31355434; or chr6:31355409-31355429.

[0599] In some embodiments, the genetic modification comprises at least one nucleotide within the genomic coordinates chosen from: chr6:31355348-31355368; chr6:31355349-31355369; chr6:31355192-31355212; chr6:31355347-31355367; chr6:31355340-31355360; and chr6:31355409-31355429. In some embodiments, the genetic modification comprises at least one nucleotide within the genomic coordinates chosen from: chr6:31355349-31355369 or chr6:31355348-31355368. In some embodiments, the genetic modification comprises at least one nucleotide within the genomic coordinates chosen from: chr6:31355192-31355212 or chr6:31355347-31355367. In some embodiments, the genetic modification comprises at least one nucleotide within the genomic coordinates chosen from: chr6:31355347-31355367; chr6:31355340-31355360; or chr6:31355409-31355429. In some embodiments, the genetic modification comprises at least one nucleotide within the genomic coordinates chosen from; chr6:31355348-31355368; chr6:31355145-31355165; chr6:31355347-31355367; chr6:31355432-31355452; or chr6:31355340-31355360.

[0600] In some embodiments, the genetic modification comprises at least one nucleotide within the genomic coordinates chosen from: chr6:31356777-31356801; chr6:31355492-31355516; chr6: 31355379-31355403; chr6:31355491-31355515; chr6:31355361-31355385; chr6:31355356-31355380; chr6:31355460-31355484; chr6:31357078-31357102; chr6:31355417-31355441; chr6:31355366-31355390; chr6:31355415-31355439; chr6:31355378-31355402; chr6:31355166-31355190; chr6:31355401-31355425; ch6:31355469-31355493; chr6:31355221-31355245; chr6:31355222-31355246; chr6:31355205-31355229; chr6:31355446-31355470; chr6:31356425-31356449; chr6:31355441-31355465; chr6:31355203-31355227; chr6:31356437-31356461; chr6:31356426-31356450; chr6:31356763-31356787; or chr6:31356764-31356788.

[0601] In some embodiments, the genetic modification comprises at least one nucleotide within the genomic coordinates chosen from: chr6:31356777-31356801; chr6:31355492-31355516; chr6:31355361-31355385; chr6:31355379-31355403; chr6:31355491-31355515; chr6:31355356-31355380; chr6:31355366-31355390; chr6:31355417-31355441; chr6:31357078-31357102; chr6:31355460-31355484; chr6:31355415-31355439; chr6:31355166-31355190; chr6:31355378-31355402; chr6:31355401-31355425; chr6:31356262-31356286; chr6:31355221-31355245; chr6:31355222-31355246; chr6:31355205-31355229; chr6:31355446-31355470; chr6:31356425-31356449; chr6:31355441-31355465; chr6:31355203-31355227; chr6:31356437-31356461; chr6:31356426-31356450; chr6:31356763-31356787; or chr6:31356764-31356788.

[0602] In some embodiments, the genetic modification comprises at least one nucleotide within the genomic coordinates chosen from: chr6:31356777-31356801; chr6:31355492-31355516; chr6:31355379-31355403; ch6:31355491-31355515; chr6:31355361-31355385; chr6:31355356-31355380; chr6:31355460-31355484; chr6:31357078-31357102; chr6:31355417-31355441; chr6:31355366-31355390; chr6:31355221-31355245; chr6:31355222-31355246; chr6:31355205-31355229; chr6:31355446-31355470; chr6:31356425-31356449; chr6:31355441-31355465; chr6:31355203-31355227; chr6:31356437-31356461; chr6:31356426-31356450; chr6:31356763-31356787; or chr6:31356764-31356788.

[0603] In some embodiments, the genetic modification comprises at least one nucleotide within the genomic coordinates chosen from: chr6:31356777-31356801; chr6:31355492-31355516; chr6:31355379-31355403; ch6:31355491-31355515; chr6:31355361-31355385; chr6:31355221-31355245; chr6:31355222-31355246; chr6:31355205-31355229; chr6:31355446-31355470; chr6:31356425-31356449; or chr6:31355441-31355465.

[0604] In some embodiments, the genetic modification comprises at least one nucleotide within the genomic coordinates chosen from: chr6:31355221-31355245; chr6:31355222-31355246; chr6:31355205-31355229; chr6:31355446-31355470; chr6:31356425-31356449; or chr6:31355441-31355465.

[0605] In some embodiments, the genetic modification comprises at least one nucleotide within the genomic coordinates chosen from: (a) chr6:31355182-31355202; chr6:31355348-31355368; chr6:31355180-31355200; chr6:31355145-31355165; chr6:31355349-31355369; chr6:31355157-31355177; chr6:31356381-31356401; chr6:31356380-31356400; chr6:31355204-31355224; chr6:31355205-31355225; chr6:31355185-31355205; chr6:31355191-31355211; chr6:31355192-31355212; chr6:31355190-31355210; chr6:31355193-31355213; chr6:31355198-31355218; chr6:31355320-31355340; chr6:31355319-31355339; chr6:31355178-31355198; chr6:31355347-31355367; chr6:31355432-31355452; chr6:31355340-31355360; chr6:31355576-31355596; chr6:31355410-31355430; chr6:31355419-31355439; chr6:31355414-31355434; and chr6:31355409-31355429; or (b) chr6:31356777-31356801; chr6:31355492-31355516; chr6:31355379-31355403; chr6:31355491-31355515; chr6:31355361-31355385; chr6:31355356-31355380; chr6:31355460-31355484; chr6:31357078-31357102; chr6:31355417-31355441; chr6:31355366-31355390; chr6:31355415-31355439; chr6:31355378-31355402; chr6:31355166-31355190; chr6:31355401-31355425; ch6:31355469-31355493; chr6:31356262-31356286; chr6:31355419-31355443; chr6:31355390-31355414; chr6:31355369-31355393; chr6:31355221-31355245; chr6:31355222-31355246; chr6:31355205-31355229; chr6:31355446-31355470; chr6:31356425-31356449; chr6:31355441-31355465; chr6:31355203-31355227; chr6:31356437-31356461; chr6:31356426-31356450; chr6:31356763-31356787; chr6:31356764-31356788; chr6:31356762-31356786; chr6:31355204-31355228; chr6:31356436-31356460; or chr6:31356767-31356791.

[0606] In some embodiments, the genetic modification comprises at least one nucleotide within the genomic coordinates chosen from: (a) chr6:31355348-31355368; or (b) chr6:31355390-31355414; chr6:31355417-31355441; or chr6: 31356386-31356410.

[0607] In some embodiments, the genetic modification comprises an indel, a C to T substitution, or an A to G substitution within the genomic coordinates chosen from; chr6:31355182-31355202; chr6:31355348-31355368; chr6:31355145-31355165; chr6:31355349-31355369; chr6:31356381-31356401; chr6:31356380-31356400; chr6:31355204-31355224; chr6:31355205-31355225; chr6:31355191-31355211; chr6:31355192-31355212; chr6:31355193-31355213; chr6:31355198-31355218; chr6:31355320-31355340; chr6:31355319-31355339; chr6:31355347-31355367; chr6:31355432-31355452; chr6:31355340-31355360; chr6:31355410-31355430; chr6:31355414-31355434; or chr6:31355409-31355429.

[0608] In some embodiments, the genetic modification comprises an indel, a C to T substitution, or an A to G substitution within the genomic coordinates chosen from; chr6:31355182-31355202; chr6:31355349-31355369; chr6:31355348-31355368; or chr6:31355145-31355165.

[0609] In some embodiments, the genetic modification comprises an indel, a C to T substitution, or an A to G substitution within the genomic coordinates chosen from; chr6:31355348-31355368; chr6:31355349-31355369; chr6:31356381-31356401; chr6:31356380-31356400; chr6:31355204-31355224; chr6:31355205-31355225; chr6:31355191-31355211; chr6:31355192-31355212; chr6:31355193-31355213; chr6:31355198-31355218; chr6:31355320-31355340; chr6:31355319-31355339; chr6:31355182-31355202; chr6:31355178-31355198; chr6:31355347-31355367; chr6:31355145-31355165; chr6:31355432-31355452; chr6:31355340-31355360; or chr6:31355414-31355434.

[0610] In some embodiments, the genetic modification comprises an indel, a C to T substitution, or an A to G substitution within the genomic coordinates chosen from; chr6:31355348-31355368; chr6:31355349-31355369; chr6:31356381-31356401; chr6:31356380-31356400; chr6:31355205-31355225; chr6:31355191-31355211; chr6:31355192-31355212; chr6:31355193-31355213; chr6:31355198-31355218; chr6:31355320-31355340; chr6:31355319-31355339; chr6:31355182-31355202; chr6:31355178-31355198; chr6:31355347-31355367; chr6:31355145-31355165; chr6:31355432-31355452; chr6:31355340-31355360; chr6:31355410-31355430; chr6:31355414-31355434; or chr6:31355409-31355429.

[0611] In some embodiments, the genetic modification comprises an indel, a C to T substitution, or an A to G substitution within the genomic coordinates chosen from; chr6:31355348-31355368, chr6:31355349-31355369, chr6:31355192-31355212, chr6:31355347-31355367, chr6:31355340-31355360, chr6:31355409-31355429. In some embodiments, the genetic modification comprises an indel, a C to T substitution, or an A to G substitution within the genomic coordinates chosen from: chr6:31355349-31355369 or chr6:31355348-31355368. In some embodiments, the genetic modification comprises an indel, a C to T substitution, or an A to G substitution within the genomic coordinates chosen from: chr6:31355192-31355212 or chr6:31355347-31355367. In some embodiments, the genetic modification comprises an indel, a C to T substitution, or an A to G substitution within the genomic coordinates chosen from: chr6:31355347-31355367; chr6:31355340-31355360; or chr6:31355409-31355429. In some embodiments, the genetic modification comprises an indel, a C to T substitution, or an A to G substitution within the genomic coordinates chosen from: chr6:31355348-31355368; chr6:31355145-31355165; chr6:31355347-31355367; chr6:31355432-31355452; or chr6:31355340-31355360.

[0612] In some embodiments, the genetic modification comprises an indel, a C to T substitution, or an A to G substitution within the genomic coordinates chosen from; chr6:31356777-31356801; chr6:31355492-31355516; chr6: 31355379-31355403; chr6:31355491-31355515; chr6:31355361-31355385; chr6:31355356-31355380; chr6:31355460-31355484; chr6:31357078-31357102; chr6:31355417-31355441; chr6:31355366-31355390; chr6:31355415-31355439; chr6:31355378-31355402; chr6:31355166-31355190; chr6:31355401-31355425; ch6:31355469-31355493; chr6:31355221-31355245; chr6:31355222-31355246; chr6:31355205-31355229; chr6:31355446-31355470; chr6:31356425-31356449; chr6:31355441-31355465; chr6:31355203-31355227; chr6:31356437-31356461; chr6:31356426-31356450; chr6:31356763-31356787; or chr6:31356764-31356788.

[0613] In some embodiments, the genetic modification comprises an indel, a C to T substitution, or an A to G substitution within the genomic coordinates chosen from; chr6:31356777-31356801; chr6:31355492-31355516; chr6:31355361-31355385; chr6:31355379-31355403; chr6:31355491-31355515; chr6:31355356-31355380; chr6:31355366-31355390; chr6:31355417-31355441; chr6:31357078-31357102; chr6:31355460-31355484; chr6:31355415-31355439; chr6:31355166-31355190; chr6:31355378-31355402; chr6:31355401-31355425; and chr6:31356262-31356286; chr6:31355221-31355245; chr6:31355222-31355246; chr6:31355205-31355229; chr6:31355446-31355470; chr6:31356425-31356449; chr6:31355441-31355465; chr6:31355203-31355227; chr6:31356437-31356461; chr6:31356426-31356450; chr6:31356763-31356787; or chr6:31356764-31356788.

[0614] In some embodiments, the genetic modification comprises an indel, a C to T substitution, or an A to G substitution within the genomic coordinates chosen from; chr6:31356777-31356801; chr6:31355492-31355516; chr6:31355379-31355403; ch6:31355491-31355515; chr6:31355361-31355385; chr6:31355356-31355380; chr6:31355460-31355484; chr6:31357078-31357102; chr6:31355417-31355441; chr6:31355366-31355390; chr6:31355221-31355245; chr6:31355222-31355246; chr6:31355205-31355229; chr6:31355446-31355470; chr6:31356425-31356449; chr6:31355441-31355465; chr6:31355203-31355227; chr6:31356437-31356461; chr6:31356426-31356450; chr6:31356763-31356787; or chr6:31356764-31356788.

[0615] In some embodiments, the genetic modification comprises an indel, a C to T substitution, or an A to G substitution within the genomic coordinates chosen from; chr6:31356777-31356801; chr6:31355492-31355516; chr6:31355379-31355403; ch6:31355491-31355515; chr6:31355361-31355385; chr6:31355221-31355245; chr6:31355222-31355246; chr6:31355205-31355229; chr6:31355446-31355470; chr6:31356425-31356449; or chr6:31355441-31355465.

[0616] In some embodiments, the genetic modification comprises an indel, a C to T substitution, or an A to G substitution within the genomic coordinates chosen from; chr6:31355221-31355245; chr6:31355222-31355246; chr6:31355205-31355229; chr6:31355446-31355470; chr6:31356425-31356449; or chr6:31355441-31355465.

[0617] In some embodiments, the genetic modification comprises an indel, a C to T substitution, or an A to G substitution within the genomic coordinates chosen from; chr6:31355182-31355202; chr6:31355348-31355368; chr6:31355180-31355200; chr6:31355145-31355165; chr6:31355349-31355369; chr6:31355157-31355177; chr6:31356381-31356401; chr6:31356380-31356400; chr6:31355204-31355224; chr6:31355205-31355225; chr6:31355185-31355205; chr6:31355191-31355211; chr6:31355192-31355212; chr6:31355190-31355210; chr6:31355193-31355213; chr6:31355198-31355218; chr6:31355320-31355340; chr6:31355319-31355339; chr6:31355178-31355198; chr6:31355347-31355367; chr6:31355432-31355452; chr6:31355340-31355360; chr6:31355576-31355596; chr6:31355410-31355430; chr6:31355419-31355439; chr6:31355414-31355434; and chr6:31355409-31355429; or (b) chr6:31356777-31356801; chr6:31355492-31355516; chr6:31355379-31355403; chr6:31355491-31355515; chr6:31355361-31355385; chr6:31355356-31355380; chr6:31355460-31355484; chr6:31357078-31357102; chr6:31355417-31355441; chr6:31355366-31355390; chr6:31355415-31355439; chr6:31355378-31355402; chr6:31355166-31355190; chr6:31355401-31355425; ch6:31355469-31355493; chr6:31356262-31356286; chr6:31355419-31355443; chr6:31355390-31355414; chr6:31355369-31355393; chr6:31355221-31355245; chr6:31355222-31355246; chr6:31355205-31355229; chr6:31355446-31355470; chr6:31356425-31356449; chr6:31355441-31355465; chr6:31355203-31355227; chr6:31356437-31356461; chr6:31356426-31356450; chr6:31356763-31356787; chr6:31356764-31356788; chr6:31356762-31356786; chr6:31355204-31355228; chr6:31356436-31356460; or chr6:31356767-31356791.

[0618] In some embodiments, the genetic modification comprises an indel, a C to T substitution, or an A to G substitution within the genomic coordinates chosen from: (a) chr6:31355348-31355368; or (b) chr6:31355390-31355414; chr6:31355417-31355441; or chr6: 31356386-31356410.

[0619] In some embodiments, the modification to HLA-B comprises any one or more of an insertion, deletion, substitution, or deamination of at least one nucleotide in a target sequence. In some embodiments, the modification to HLA-B comprises an insertion of 1, 2, 3, 4 or 5 or more nucleotides in a target sequence. In some embodiments, the modification to HLA-B comprises a deletion of 1, 2, 3, 4 or 5 or more nucleotides in a target sequence. In other embodiments, the modification to HLA-B comprises an insertion of 1, 2, 3, 4, 5, 6, 7, 8, 9, 10, 15, 20 or 25 or more nucleotides in a target sequence. In other embodiments, the modification to HLA-B comprises a deletion of 1, 2, 3, 4, 5, 6, 7, 8, 9, 10, 15, 20 or 25 or more nucleotides in a target sequence. In some embodiments, the modification to HLA-B comprises an indel, which is generally defined in the art as an insertion or deletion of less than 1000 base pairs (bp). In some embodiments, the modification to HLA-B comprises an indel which results in a frameshift mutation in a target sequence. In some embodiments, the modification to HLA-B comprises a substitution of 1, 2, 3, 4, 5, 6, 7, 8, 9, 10, 15, 20 or 25 or more nucleotides in a target sequence. In some embodiments, the modification to HLA-B comprises one or more of an insertion, deletion, or substitution of nucleotides resulting from the incorporation of a template nucleic acid. In some embodiments, the modification to HLA-B comprises an insertion of a donor nucleic acid in a target sequence. In some embodiments, the modification to HLA-B is not transient.

### 3. HLA-A Guide RNAs

[0620] The methods and compositions provided herein disclose guide RNAs useful for reducing or eliminating the surface expression of HLA-A protein. In some embodiments, such guide RNAs direct an RNA-guided DNA binding agent to an HLA-A genomic target sequence and may be referred to herein as “HLA-A guide RNAs.” In some embodiments, the HLA-A guide RNA directs an RNA-guided DNA binding agent to a human HLA-A genomic target sequence. In some embodiments, the HLA-A guide RNA comprises a guide sequence selected from SEQ ID NO: 301-428, 429-462, 463-511 and 512-590. Further detailed description of the guide RNAs for reducing or eliminating the surface expression of HLA-A protein and for genetic modifications of HLA-A are provided in PCT/US2021/064930, the entire contents of which is incorporated herein by reference.

[0621] In some embodiments, a composition is provided comprising an HLA-A guide RNA described herein and an RNA-guided DNA binding agent or a nucleic acid encoding an RNA-guided DNA binding agent.

[0622] In some embodiments, a composition is provided comprising an HLA-A single-guide RNA (sgRNA) comprising a guide sequence selected from SEQ ID NO: 301-590. In some embodiments, a composition is provided comprising HLA-A sgRNA described herein and an RNA-guided DNA binding agent or a nucleic acid encoding an RNA-guided DNA binding agent.

[0623] In some embodiments, a composition is provided comprising an HLA-A dual-guide RNA (dgRNA) comprising a guide sequence selected from SEQ ID NO: 301-590. In some embodiments, a composition is provided comprising an HLA-A dgRNA described herein and an RNA-guided DNA binding agent or a nucleic acid encoding an RNA-guided DNA binding agent.

[0624] In some embodiments, the HLA-A gRNA comprises a guide sequence selected from any one of SEQ ID NOs: 301-590. Exemplary HLA-A guide sequences are shown below in Table 4 (SEQ ID NOs: 301-428), Table 5A and Table 5B (SEQ ID NOs: 429-482), and Table 6 (SEQ ID NOs:483-498, 500-511), and Table 7 (SEQ ID NOs: 512-590). In some embodiments, the HLA-A gRNA is a sgRNA comprising a sequence as shown below in Table 4 (SEQ ID NOs: 1301-1428 and 2301-2428), Table 6 (SEQ ID NOs: 1483-1498, 1500-1511, 2483-2498, 2500-2511), Table 7 (SEQ ID NOs: 1512-1590 and 2512-2590), and Table 9A (SEQ ID NOs: 3111 and 3112).

TABLE 4
Exemplary Spy HLA-A guide RNAs

| | | | | Exemplary Mod | |
|---|---|---|---|---|---|
| | | | | Sequence | |
| | | | | (four terminal U | |
| | SEQ ID | | Exemplary | residues are optional | |
| | NO to the | | Full Sequence | and may include 0, 1, | Genomic |
| | Guide | | (SEQ ID NOS: | 2, 3, 4, or more Us) | Coordinates |
| Guide ID | Sequence | Guide Sequence | 1301-1428) | (SEQ ID NOs: 2301-2428) | (hg38) |
| G018983 | 301 | UGGAGGGCC | UGGAGGGCC | mU*mG*mG*AGG | chr6: 29945290- |
| | | UGAUGUGUG | UGAUGUGUG | GCCUGAUGUGUG | 29945310 |
| | | UU | UUGUUUUAG | UUGUUUUAGAmG | (mismatch to |
| | | | AGCUAGAAA | mCmUmAmGmAm | hg38 = 2) |
| | | | UAGCAAGUU | AmAmUmAmGmC | |
| | | | AAAAUAAGG | AAGUUAAAAUAA | |
| | | | CUAGUCCGU | GGCUAGUCCGUU | |
| | | | UAUCAACUU | AUCAmAmCmUmU | |
| | | | GAAAAAGUG | mGmAmAmAmAm | |
| | | | GCACCGAGUC | AmGmUmGmGmC | |
| | | | GGUGCUUUU | mAmCmCmGmAm | |
| | | | | GmUmCmGmGmU | |
| | | | | mGmCmU*mU*mU | |
| | | | | *mU | |
| G018984 | 302 | GCCUGAUGU | GCCUGAUGU | mG*mC*mC*UGAU | chr6: 29945296- |
| | | GUGUUGGGU | GUGUUGGGU | GUGUGUUGGGUG | 29945316 |
| | | GU | GUGUUUUAG | UGUUUUAGAmGm | (mismatch to |
| | | | AGCUAGAAA | CmUmAmGmAmA | hg38 = 2) |
| | | | UAGCAAGUU | mAmUmAmGmCA | |
| | | | AAAAUAAGG | AGUUAAAAUAAG | |
| | | | CUAGUCCGU | GCUAGUCCGUUA | |
| | | | UAUCAACUU | UCAmAmCmUmU | |
| | | | GAAAAAGUG | mGmAmAmAmAm | |
| | | | GCACCGAGUC | AmGmUmGmGmC | |
| | | | GGUGCUUUU | mAmCmCmGmAm | |
| | | | | GmUmCmGmGmU | |
| | | | | mGmCmU*mU*mU | |
| | | | | *mU | |
| G018985 | 303 | CCUGAUGUG | CCUGAUGUG | mC*mC*mU*GAUG | chr6: 29945297- |
| | | UGUUGGGUG | UGUUGGGUG | UGUGUUGGGUGU | 29945317 |
| | | UU | UUGUUUUAG | UGUUUUAGAmGm | (mismatch to |
| | | | AGCUAGAAA | CmUmAmGmAmA | hg38 = 1) |
| | | | UAGCAAGUU | mAmUmAmGmCA | |
| | | | AAAAUAAGG | AGUUAAAAUAAG | |
| | | | CUAGUCCGU | GCUAGUCCGUUA | |
| | | | UAUCAACUU | UCAmAmCmUmU | |
| | | | GAAAAAGUG | mGmAmAmAmAm | |
| | | | GCACCGAGUC | AmGmUmGmGmC | |
| | | | GGUGCUUUU | mAmCmCmGmAm | |
| | | | | GmUmCmGmGmU | |
| | | | | mGmCmU*mU*mU | |
| | | | | *mU | |
| G018986 | 304 | CCCAACACCC | CCCAACACCC | mC*mC*mC*AACA | chr6: 29945300- |
| | | AACACACAUC | AACACACAUC | CCCAACACACAU | 29945320 |
| | | | GUUUUAGAG | CGUUUUAGAmGm | (mismatch to |
| | | | CUAGAAAUA | CmUmAmGmAmA | hg38 = 1) |
| | | | GCAAGUUAA | mAmUmAmGmCA | |
| | | | AAUAAGGCU | AGUUAAAAUAAG | |
| | | | AGUCCGUUA | GCUAGUCCGUUA | |
| | | | UCAACUUGA | UCAmAmCmUmU | |
| | | | AAAAGUGGC | mGmAmAmAmAm | |
| | | | ACCGAGUCG | AmGmUmGmGmC | |
| | | | GUGCUUUU | mAmCmCmGmAm | |
| | | | | GmUmCmGmGmU | |
| | | | | mGmCmU*mU*mU | |
| | | | | *mU | |
| G018965 | 305 | UCAGGAAAC | UCAGGAAAC | mU*mC*mA*GGA | chr6: 29890117- |
| | | AUGAAGAAA | AUGAAGAAA | AACAUGAAGAAA | |
| | | GC | GCGUUUUAG | GCGUUUUAGAmG | |
| | | | AGCUAGAAA | mCmUmAmGmAm | |
| | | | UAGCAAGUU | AmAmUmAmGmC | |
| | | | AAAAUAAGG | AAGUUAAAAUAA | |
| | | | CUAGUCCGU | GGCUAGUCCGUU | |
| | | | UAUCAACUU | AUCAmAmCmUmU | 29890137 |
| | | | GAAAAAGUG | mGmAmAmAmAm | |
| | | | GCACCGAGUC | AmGmUmGmGmC | |
| | | | GGUGCUUUU | mAmCmCmGmAm | |
| | | | | GmUmCmGmGmU | |
| | | | | mGmCmU*mU*mU | |
| | | | | *mU | |
| G019018 | 306 | AGGCGCCUG | AGGCGCCUG | mA*mG*mG*CGCC | chr6: 29927058- |
| | | GGCCUCUCCC | GGCCUCUCCC | UGGGCCUCUCCC | 29927078 |
| | | G | GGUUUUAGA | GGUUUUAGAmGm | |
| | | | GCUAGAAAU | CmUmAmGmAmA | |
| | | | AGCAAGUUA | mAmUmAmGmCA | |
| | | | AAAUAAGGC | AGUUAAAAUAAG | |
| | | | UAGUCCGUU | GCUAGUCCGUUA | |
| | | | AUCAACUUG | UCAmAmCmUmU | |
| | | | AAAAAGUGG | mGmAmAmAmAm | |
| | | | CACCGAGUCG | AmGmUmGmGmC | |
| | | | GUGCUUUU | mAmCmCmGmAm | |
| | | | | GmUmCmGmGmU | |
| | | | | mGmCmU*mU*mU | |
| | | | | *mU | |
| G018937 | 307 | CGGGCUGGCC | CGGGCUGGCC | mC*mG*mG*GCUG | chr6: 29934330- |
| | | UCCCACAAGG | UCCCACAAGG | GCCUCCCACAAG | 29934350 |
| | | | GUUUUAGAG | GGUUUUAGAmGm | |
| | | | CUAGAAAUA | CmUmAmGmAmA | |
| | | | GCAAGUUAA | mAmUmAmGmCA | |
| | | | AAUAAGGCU | AGUUAAAAUAAG | |
| | | | AGUCCGUUA | GCUAGUCCGUUA | |
| | | | UCAACUUGA | UCAmAmCmUmU | |
| | | | AAAAGUGGC | mGmAmAmAmAm | |
| | | | ACCGAGUCG | AmGmUmGmGmC | |
| | | | GUGCUUUU | mAmCmCmGmAm | |
| | | | | GmUmCmGmGmU | |
| | | | | mGmCmU*mU*mU | |
| | | | | *mU | |
| G018990 | 308 | ACGGCCAUCC | ACGGCCAUCC | mA*mC*mG*GCCA | chr6: 29942541- |
| | | UCGGCGUCU | UCGGCGUCU | UCCUCGGCGUCU | 29942561 |
| | | G | GGUUUUAGA | GGUUUUAGAmGm | |
| | | | GCUAGAAAU | CmUmAmGmAmA | |
| | | | AGCAAGUUA | mAmUmAmGmCA | |
| | | | AAAUAAGGC | AGUUAAAAUAAG | |
| | | | UAGUCCGUU | GCUAGUCCGUUA | |
| | | | AUCAACUUG | UCAmAmCmUmU | |
| | | | AAAAAGUGG | mGmAmAmAmAm | |
| | | | CACCGAGUCG | AmGmUmGmGmC | |
| | | | GUGCUUUU | mAmCmCmGmAm | |
| | | | | GmUmCmGmGmU | |
| | | | | mGmCmU*mU*mU | |
| | | | | *mU | |
| G018991 | 309 | GACGGCCAUC | GACGGCCAUC | mG*mA*mC*GGCC | chr6: 29942542- |
| | | CUCGGCGUCU | CUCGGCGUCU | AUCCUCGGCGUC | 29942562 |
| | | | GUUUUAGAG | UGUUUUAGAmGm | |
| | | | CUAGAAAUA | CmUmAmGmAmA | |
| | | | GCAAGUUAA | mAmUmAmGmCA | |
| | | | AAUAAGGCU | AGUUAAAAUAAG | |
| | | | AGUCCGUUA | GCUAGUCCGUUA | |
| | | | UCAACUUGA | UCAmAmCmUmU | |
| | | | AAAAGUGGC | mGmAmAmAmAm | |
| | | | ACCGAGUCG | AmGmUmGmGmC | |
| | | | GUGCUUUU | mAmCmCmGmAm | |
| | | | | GmUmCmGmGmU | |
| | | | | mGmCmU*mU*mU | |
| | | | | *mU | |
| G018992 | 310 | GACGCCGAG | GACGCCGAG | mG*mA*mC*GCCG | chr6: 29942543- |
| | | GAUGGCCGU | GAUGGCCGU | AGGAUGGCCGUC | 29942563 |
| | | CA | CAGUUUUAG | AGUUUUAGAmGm | |
| | | | AGCUAGAAA | CmUmAmGmAmA | |
| | | | UAGCAAGUU | mAmUmAmGmCA | |
| | | | AAAAUAAGG | AGUUAAAAUAAG | |
| | | | CUAGUCCGU | GCUAGUCCGUUA | |
| | | | UAUCAACUU | UCAmAmCmUmU | |
| | | | GAAAAAGUG | mGmAmAmAmAm | |
| | | | GCACCGAGUC | AmGmUmGmGmC | |
| | | | GGUGCUUUU | mAmCmCmGmAm | |
| | | | | GmUmCmGmGmU | |
| | | | | mGmCmU*mU*mU | |
| | | | | *mU | |
| G018993 | 311 | UGACGGCCA | UGACGGCCA | mU*mG*mA*CGGC | chr6: 29942543- |
| | | UCCUCGGCGU | UCCUCGGCGU | CAUCCUCGGCGU | 29942563 |
| | | C | CGUUUUAGA | CGUUUUAGAmGm | |
| | | | GCUAGAAAU | CmUmAmGmAmA | |
| | | | AGCAAGUUA | mAm UmAmGmCA | |
| | | | AAAUAAGGC | AGUUAAAAUAAG | |
| | | | UAGUCCGUU | GCUAGUCCGUUA | |
| | | | AUCAACUUG | UCAmAmCmUmU | |
| | | | AAAAAGUGG | mGmAmAmAmAm | |
| | | | CACCGAGUCG | AmGmUmGmGmC | |
| | | | GUGCUUUU | mAmCmCmGmAm | |
| | | | | GmUmCmGmGmU | |
| | | | | mGmCmU*mU*mU | |
| | | | | *mU | |
| G018994 | 312 | GGCGCCAUG | GGCGCCAUG | mG*mG*mC*GCCA | chr6: 29942550- |
| | | ACGGCCAUCC | ACGGCCAUCC | UGACGGCCAUCC | 29942570 |
| | | U | UGUUUUAGA | UGUUUUAGAmGm | |
| | | | GCUAGAAAU | CmUmAmGmAmA | |
| | | | AGCAAGUUA | mAmUmAmGmCA | |
| | | | AAAUAAGGC | AGUUAAAAUAAG | |
| | | | UAGUCCGUU | GCUAGUCCGUUA | |
| | | | AUCAACUUG | UCAmAmCmUmU | |
| | | | AAAAAGUGG | mGmAmAmAmAm | |
| | | | CACCGAGUCG | AmGmUmGmGmC | |
| | | | GUGCUUUU | mAmCmCmGmAm | |
| | | | | GmUmCmGmGmU | |
| | | | | mGmCmU*mU*mU | |
| | | | | *mU | |
| G018995 | 313 | ACAGCGACGC | ACAGCGACGC | mA*mC*mA*GCGA | chr6: 29942864- |
| | | CGCGAGCCAG | CGCGAGCCAG | CGCCGCGAGCCA | 29942884 |
| | | | GUUUUAGAG | GGUUUUAGAmGm | |
| | | | CUAGAAAUA | CmUmAmGmAmA | |
| | | | GCAAGUUAA | mAmUmAmGmCA | |
| | | | AAUAAGGCU | AGUUAAAAUAAG | |
| | | | AGUCCGUUA | GCUAGUCCGUUA | |
| | | | UCAACUUGA | UCAmAmCmUmU | |
| | | | AAAAGUGGC | mGmAmAmAmAm | |
| | | | ACCGAGUCG | AmGmUmGmGmC | |
| | | | GUGCUUUU | mAmCmCmGmAm | |
| | | | | GmUmCmGmGmU | |
| | | | | mGmCmU*mU*mU | |
| | | | | *mU | |
| G018996 | 314 | CGACGCCGCG | CGACGCCGCG | mC*mG*mA*CGCC | chr6: 29942868- |
| | | AGCCAGAGG | AGCCAGAGG | GCGAGCCAGAGG | 29942888 |
| | | A | AGUUUUAGA | AGUUUUAGAmGm | |
| | | | GCUAGAAAU | CmUmAmGmAmA | |
| | | | AGCAAGUUA | mAmUmAmGmCA | |
| | | | AAAUAAGGC | AGUUAAAAUAAG | |
| | | | UAGUCCGUU | GCUAGUCCGUUA | |
| | | | AUCAACUUG | UCAmAmCmUmU | |
| | | | AAAAAGUGG | mGmAmAmAmAm | |
| | | | CACCGAGUCG | AmGmUmGmGmC | |
| | | | GUGCUUUU | mAmCmCmGmAm | |
| | | | | GmUmCmGmGmU | |
| | | | | mGmCmU*mU*mU | |
| | | | | *mU | |
| G018997 | 315 | CGAGCCAGA | CGAGCCAGA | mC*mG*mA*GCCA | chr6: 29942876- |
| | | GGAUGGAGC | GGAUGGAGC | GAGGAUGGAGCC | 29942896 |
| | | CG | CGGUUUUAG | GGUUUUAGAmGm | |
| | | | AGCUAGAAA | CmUmAmGmAmA | |
| | | | UAGCAAGUU | mAmUmAmGmCA | |
| | | | AAAAUAAGG | AGUUAAAAUAAG | |
| | | | CUAGUCCGU | GCUAGUCCGUUA | |
| | | | UAUCAACUU | UCAmAmCmUmU | |
| | | | GAAAAAGUG | mGmAmAmAmAm | |
| | | | GCACCGAGUC | AmGmUmGmGmC | |
| | | | GGUGCUUUU | mAmCmCmGmAm | |
| | | | | GmUmCmGmGmU | |
| | | | | mGmCmU*mU*mU | |
| | | | | *mU | |
| G018998 | 316 | CGGCUCCAUC | CGGCUCCAUC | mC*mG*mG*CUCC | chr6: 29942876- |
| | | CUCUGGCUCG | CUCUGGCUCG | AUCCUCUGGCUC | 29942896 |
| | | | GUUUUAGAG | GGUUUUAGAmGm | |
| | | | CUAGAAAUA | CmUmAmGmAmA | |
| | | | GCAAGUUAA | mAmUmAmGmCA | |
| | | | AAUAAGGCU | AGUUAAAAUAAG | |
| | | | AGUCCGUUA | GCUAGUCCGUUA | |
| | | | UCAACUUGA | UCAmAmCmUmU | |
| | | | AAAAGUGGC | mGmAmAmAmAm | |
| | | | ACCGAGUCG | AmGmUmGmGmC | |
| | | | GUGCUUUU | mAmCmCmGmAm | |
| | | | | GmUmCmGmGmU | |
| | | | | mGmCmU*mU*mU | |
| | | | | *mU | |
| G018999 | 317 | GAGCCAGAG | GAGCCAGAG | mG*mA*mG*CCAG | chr6: 29942877- |
| | | GAUGGAGCC | GAUGGAGCC | AGGAUGGAGCCG | 29942897 |
| | | GC | GCGUUUUAG | CGUUUUAGAmGm | |
| | | | AGCUAGAAA | CmUmAmGmAmA | |
| | | | UAGCAAGUU | mAmUmAmGmCA | |
| | | | AAAAUAAGG | AGUUAAAAUAAG | |
| | | | CUAGUCCGU | GCUAGUCCGUUA | |
| | | | UAUCAACUU | UCAmAmCmUmU | |
| | | | GAAAAAGUG | mGmAmAmAmAm | |
| | | | GCACCGAGUC | AmGmUmGmGmC | |
| | | | GGUGCUUUU | mAmCmCmGmAm | |
| | | | | GmUmCmGmGmU | |
| | | | | mGmCmU*mU*mU | |
| | | | | *mU | |
| G019000 | 318 | GCGCCCGCGG | GCGCCCGCGG | mG*mC*mG*CCCG | chr6: 29942883- |
| | | CUCCAUCCUC | CUCCAUCCUC | CGGCUCCAUCCU | 29942903 |
| | | | GUUUUAGAG | CGUUUUAGAmGm | |
| | | | CUAGAAAUA | CmUmAmGmAmA | |
| | | | GCAAGUUAA | mAmUmAmGmCA | |
| | | | AAUAAGGCU | AGUUAAAAUAAG | |
| | | | AGUCCGUUA | GCUAGUCCGUUA | |
| | | | UCAACUUGA | UCAmAmCmUmU | |
| | | | AAAAGUGGC | mGmAmAmAmAm | |
| | | | ACCGAGUCG | AmGmUmGmGmC | |
| | | | GUGCUUUU | mAmCmCmGmAm | |
| | | | | GmUmCmGmGmU | |
| | | | | mGmCmU*mU*mU | |
| | | | | *mU | |
| G019001 | 319 | GCCCGUCCGU | GCCCGUCCGU | mG*mC*mC*CGUC | chr6: 29943062- |
| | | GGGGGAUGA | GGGGGAUGA | CGUGGGGGAUGA | 29943082 |
| | | G | GGUUUUAGA | GGUUUUAGAmGm | |
| | | | GCUAGAAAU | CmUmAmGmAmA | |
| | | | AGCAAGUUA | mAmUmAmGmCA | |
| | | | AAAUAAGGC | AGUUAAAAUAAG | |
| | | | UAGUCCGUU | GCUAGUCCGUUA | |
| | | | AUCAACUUG | UCAmAmCmUmU | |
| | | | AAAAAGUGG | mGmAmAmAmAm | |
| | | | CACCGAGUCG | AmGmUmGmGmC | |
| | | | GUGCUUUU | mAmCmCmGmAm | |
| | | | | GmUmCmGmGmU | |
| | | | | mGmCmU*mU*mU | |
| | | | | *mU | |
| G019002 | 320 | UCAUCCCCCA | UCAUCCCCCA | mU*mC*mA*UCCC | chr6: 29943063- |
| | | CGGACGGGCC | CGGACGGGCC | CCACGGACGGGC | 29943083 |
| | | | GUUUUAGAG | CGUUUUAGAmGm | |
| | | | CUAGAAAUA | CmUmAmGmAmA | |
| | | | GCAAGUUAA | mAmUmAmGmCA | |
| | | | AAUAAGGCU | AGUUAAAAUAAG | |
| | | | AGUCCGUUA | GCUAGUCCGUUA | |
| | | | UCAACUUGA | UCAmAmCmUmU | |
| | | | AAAAGUGGC | mGmAmAmAmAm | |
| | | | ACCGAGUCG | AmGmUmGmGmC | |
| | | | GUGCUUUU | mAmCmCmGmAm | |
| | | | | GmUmCmGmGmU | |
| | | | | mGmCmU*mU*mU | |
| | | | | *mU | |
| G019003 | 321 | AUCUCGGACC | AUCUCGGACC | mA*mU*mC*UCGG | chr6: 29943092- |
| | | CGGAGACUG | CGGAGACUG | ACCCGGAGACUG | 29943112 |
| | | U | UGUUUUAGA | UGUUUUAGAmGm | |
| | | | GCUAGAAAU | CmUmAmGmAmA | |
| | | | AGCAAGUUA | mAmUmAmGmCA | |
| | | | AAAUAAGGC | AGUUAAAAUAAG | |
| | | | UAGUCCGUU | GCUAGUCCGUUA | |
| | | | AUCAACUUG | UCAmAmCmUmU | |
| | | | AAAAAGUGG | mGmAmAmAmAm | |
| | | | CACCGAGUCG | AmGmUmGmGmC | |
| | | | GUGCUUUU | mAmCmCmGmAm | |
| | | | | GmUmCmGmGmU | |
| | | | | mGmCmU*mU*mU | |
| | | | | *mU | |
| G019004 | 322 | GGGGUCCCGC | GGGGUCCCGC | mG*mG*mG*GUCC | chr6: 29943115- |
| | | GGCUUCGGG | GGCUUCGGG | CGCGGCUUCGGG | 29943135 |
| | | G | GGUUUUAGA | GGUUUUAGAmGm | |
| | | | GCUAGAAAU | CmUmAmGmAmA | |
| | | | AGCAAGUUA | mAmUmAmGmCA | |
| | | | AAAUAAGGC | AGUUAAAAUAAG | |
| | | | UAGUCCGUU | GCUAGUCCGUUA | |
| | | | AUCAACUUG | UCAmAmCmUmU | |
| | | | AAAAAGUGG | mGmAmAmAmAm | |
| | | | CACCGAGUCG | AmGmUmGmGmC | |
| | | | GUGCUUUU | mAmCmCmGmAm | |
| | | | | GmUmCmGmGmU | |
| | | | | mGmCmU*mU*mU | |
| | | | | *mU | |
| G019005 | 323 | CUCGGGGUCC | CUCGGGGUCC | mC*mU*mC*GGGG | chr6: 29943118- |
| | | CGCGGCUUCG | CGCGGCUUCG | UCCCGCGGCUUC | 29943138 |
| | | | GUUUUAGAG | GGUUUUAGAmGm | |
| | | | CUAGAAAUA | CmUmAmGmAmA | |
| | | | GCAAGUUAA | mAmUmAmGmCA | |
| | | | AAUAAGGCU | AGUUAAAAUAAG | |
| | | | AGUCCGUUA | GCUAGUCCGUUA | |
| | | | UCAACUUGA | UCAmAmCmUmU | |
| | | | AAAAGUGGC | mGmAmAmAmAm | |
| | | | ACCGAGUCG | AmGmUmGmGmC | |
| | | | GUGCUUUU | mAmCmCmGmAm | |
| | | | | GmUmCmGmGmU | |
| | | | | mGmCmU*mU*mU | |
| | | | | *mU | |
| G019006 | 324 | UCUCGGGGU | UCUCGGGGU | mU*mC*mU*CGGG | chr6: 29943119- |
| | | CCCGCGGCUU | CCCGCGGCUU | GUCCCGCGGCUU | 29943139 |
| | | C | CGUUUUAGA | CGUUUUAGAmGm | |
| | | | GCUAGAAAU | CmUmAmGmAmA | |
| | | | AGCAAGUUA | mAmUmAmGmCA | |
| | | | AAAUAAGGC | AGUUAAAAUAAG | |
| | | | UAGUCCGUU | GCUAGUCCGUUA | |
| | | | AUCAACUUG | UCAmAmCmUmU | |
| | | | AAAAAGUGG | mGmAmAmAmAm | |
| | | | CACCGAGUCG | AmGmUmGmGmC | |
| | | | GUGCUUUU | mAmCmCmGmAm | |
| | | | | GmUmCmGmGmU | |
| | | | | mGmCmU*mU*mU | |
| | | | | *mU | |
| G019007 | 325 | GUCUCGGGG | GUCUCGGGG | mG*mU*mC*UCGG | chr6: 29943120- |
| | | UCCCGCGGCU | UCCCGCGGCU | GGUCCCGCGGCU | 29943140 |
| | | U | UGUUUUAGA | UGUUUUAGAmGm | |
| | | | GCUAGAAAU | CmUmAmGmAmA | |
| | | | AGCAAGUUA | mAmUmAmGmCA | |
| | | | AAAUAAGGC | AGUUAAAAUAAG | |
| | | | UAGUCCGUU | GCUAGUCCGUUA | |
| | | | AUCAACUUG | UCAmAmCmUmU | |
| | | | AAAAAGUGG | mGmAmAmAmAm | |
| | | | CACCGAGUCG | AmGmUmGmGmC | |
| | | | GUGCUUUU | mAmCmCmGmAm | |
| | | | | GmUmCmGmGmU | |
| | | | | mGmCmU*mU*mU | |
| | | | | *mU | |
| G019008 | 326 | GCAAGGGUC | GCAAGGGUC | mG*mC*mA*AGG | chr6: 29943126- |
| | | UCGGGGUCCC | UCGGGGUCCC | GUCUCGGGGUCC | 29943146 |
| | | G | GGUUUUAGA | CGGUUUUAGAmG | |
| | | | GCUAGAAAU | mCmUmAmGmAm | |
| | | | AGCAAGUUA | AmAmUmAmGmC | |
| | | | AAAUAAGGC | AAGUUAAAAUAA | |
| | | | UAGUCCGUU | GGCUAGUCCGUU | |
| | | | AUCAACUUG | AUCAmAmCmUmU | |
| | | | AAAAAGUGG | mGmAmAmAmAm | |
| | | | CACCGAGUCG | AmGmUmGmGmC | |
| | | | GUGCUUUU | mAmCmCmGmAm | |
| | | | | GmUmCmGmGmU | |
| | | | | mGmCmU*mU*mU | |
| | | | | *mU | |
| G019009 | 327 | GGACCCCGAG | GGACCCCGAG | mG*mG*mA*CCCC | chr6: 29943128- |
| | | ACCCUUGCCC | ACCCUUGCCC | GAGACCCUUGCC | 29943148 |
| | | | GUUUUAGAG | CGUUUUAGAmGm | |
| | | | CUAGAAAUA | CmUmAmGmAmA | |
| | | | GCAAGUUAA | mAmUmAmGmCA | |
| | | | AAUAAGGCU | AGUUAAAAUAAG | |
| | | | AGUCCGUUA | GCUAGUCCGUUA | |
| | | | UCAACUUGA | UCAmAmCmUmU | |
| | | | AAAAGUGGC | mGmAmAmAmAm | |
| | | | ACCGAGUCG | AmGmUmGmGmC | |
| | | | GUGCUUUU | mAmCmCmGmAm | |
| | | | | GmUmCmGmGmU | |
| | | | | mGmCmU*mU*mU | |
| | | | | *mU | |
| G019010 | 328 | GACCCCGAGA | GACCCCGAGA | mG*mA*mC*CCCG | chr6: 29943129- |
| | | CCCUUGCCCC | CCCUUGCCCC | AGACCCUUGCCC | 29943149 |
| | | | GUUUUAGAG | CGUUUUAGAmGm | |
| | | | CUAGAAAUA | CmUmAmGmAmA | |
| | | | GCAAGUUAA | mAmUmAmGmCA | |
| | | | AAUAAGGCU | AGUUAAAAUAAG | |
| | | | AGUCCGUUA | GCUAGUCCGUUA | |
| | | | UCAACUUGA | UCAmAmCmUmU | |
| | | | AAAAGUGGC | mGmAmAmAmAm | |
| | | | ACCGAGUCG | AmGmUmGmGmC | |
| | | | GUGCUUUU | mAmCmCmGmAm | |
| | | | | GmUmCmGmGmU | |
| | | | | mGmCmU*mU*mU | |
| | | | | *mU | |
| G019011 | 329 | CGAGACCCUU | CGAGACCCUU | mC*mG*mA*GACC | chr6: 29943134- |
| | | GCCCCGGGAG | GCCCCGGGAG | CUUGCCCCGGGA | 29943154 |
| | | | GUUUUAGAG | GGUUUUAGAmGm | |
| | | | CUAGAAAUA | CmUmAmGmAmA | |
| | | | GCAAGUUAA | mAmUmAmGmCA | |
| | | | AAUAAGGCU | AGUUAAAAUAAG | |
| | | | AGUCCGUUA | GCUAGUCCGUUA | |
| | | | UCAACUUGA | UCAmAmCmUmU | |
| | | | AAAAGUGGC | mGmAmAmAmAm | |
| | | | ACCGAGUCG | AmGmUmGmGmC | |
| | | | GUGCUUUU | mAmCmCmGmAm | |
| | | | | GmUmCmGmGmU | |
| | | | | mGmCmU*mU*mU | |
| | | | | *mU | |
| G019012 | 330 | CUCCCGGGGC | CUCCCGGGGC | mC*mU*mC*CCGG | chr6: 29943134- |
| | | AAGGGUCUC | AAGGGUCUC | GGCAAGGGUCUC | 29943154 |
| | | G | GGUUUUAGA | GGUUUUAGAmGm | |
| | | | GCUAGAAAU | CmUmAmGmAmA | |
| | | | AGCAAGUUA | mAmUmAmGmCA | |
| | | | AAAUAAGGC | AGUUAAAAUAAG | |
| | | | UAGUCCGUU | GCUAGUCCGUUA | |
| | | | AUCAACUUG | UCAmAmCmUmU | |
| | | | AAAAAGUGG | mGmAmAmAmAm | |
| | | | CACCGAGUCG | AmGmUmGmGmC | |
| | | | GUGCUUUU | mAmCmCmGmAm | |
| | | | | GmUmCmGmGmU | |
| | | | | mGmCmU*mU*mU | |
| | | | | *mU | |
| G019013 | 331 | UCUCCCGGGG | UCUCCCGGGG | mU*mC*mU*CCCG | chr6: 29943135- |
| | | CAAGGGUCU | CAAGGGUCU | GGGCAAGGGUCU | 29943155 |
| | | C | CGUUUUAGA | CGUUUUAGAmGm | |
| | | | GCUAGAAAU | CmUmAmGmAmA | |
| | | | AGCAAGUUA | mAmUmAmGmCA | |
| | | | AAAUAAGGC | AGUUAAAAUAAG | |
| | | | UAGUCCGUU | GCUAGUCCGUUA | |
| | | | AUCAACUUG | UCAmAmCmUmU | |
| | | | AAAAAGUGG | mGmAmAmAmAm | |
| | | | CACCGAGUCG | AmGmUmGmGmC | |
| | | | GUGCUUUU | mAmCmCmGmAm | |
| | | | | GmUmCmGmGmU | |
| | | | | mGmCmU*mU*mU | |
| | | | | *mU | |
| G019014 | 332 | CUCUCCCGGG | CUCUCCCGGG | mC*mU*mC*UCCC | chr6: 29943136- |
| | | GCAAGGGUC | GCAAGGGUC | GGGGCAAGGGUC | 29943156 |
| | | U | UGUUUUAGA | UGUUUUAGAmGm | |
| | | | GCUAGAAAU | CmUmAmGmAmA | |
| | | | AGCAAGUUA | mAmUmAmGmCA | |
| | | | AAAUAAGGC | AGUUAAAAUAAG | |
| | | | UAGUCCGUU | GCUAGUCCGUUA | |
| | | | AUCAACUUG | UCAmAmCmUmU | |
| | | | AAAAAGUGG | mGmAmAmAmAm | |
| | | | CACCGAGUCG | AmGmUmGmGmC | |
| | | | GUGCUUUU | mAmCmCmGmAm | |
| | | | | GmUmCmGmGmU | |
| | | | | mGmCmU*mU*mU | |
| | | | | *mU | |
| G019015 | 333 | CCUUGCCCCG | CCUUGCCCCG | mC*mC*mU*UGCC | chr6: 29943140- |
| | | GGAGAGGCC | GGAGAGGCC | CCGGGAGAGGCC | 29943160 |
| | | C | CGUUUUAGA | CGUUUUAGAmGm | |
| | | | GCUAGAAAU | CmUmAmGmAmA | |
| | | | AGCAAGUUA | mAmUmAmGmCA | |
| | | | AAAUAAGGC | AGUUAAAAUAAG | |
| | | | UAGUCCGUU | GCUAGUCCGUUA | |
| | | | AUCAACUUG | UCAmAmCmUmU | |
| | | | AAAAAGUGG | mGmAmAmAmAm | |
| | | | CACCGAGUCG | AmGmUmGmGmC | |
| | | | GUGCUUUU | mAmCmCmGmAm | |
| | | | | GmUmCmGmGmU | |
| | | | | mGmCmU*mU*mU | |
| | | | | *mU | |
| G019016 | 334 | CUGGGCCUCU | CUGGGCCUCU | mC*mU*mG*GGCC | chr6: 29943142- |
| | | CCCGGGGCAA | CCCGGGGCAA | UCUCCCGGGGCA | 29943162 |
| | | | GUUUUAGAG | AGUUUUAGAmGm | |
| | | | CUAGAAAUA | CmUmAmGmAmA | |
| | | | GCAAGUUAA | mAmUmAmGmCA | |
| | | | AAUAAGGCU | AGUUAAAAUAAG | |
| | | | AGUCCGUUA | GCUAGUCCGUUA | |
| | | | UCAACUUGA | UCAmAmCmUmU | |
| | | | AAAAGUGGC | mGmAmAmAmAm | |
| | | | ACCGAGUCG | AmGmUmGmGmC | |
| | | | GUGCUUUU | mAmCmCmGmAm | |
| | | | | GmUmCmGmGmU | |
| | | | | mGmCmU*mU*mU | |
| | | | | *mU | |
| G019017 | 335 | CCUGGGCCUC | CCUGGGCCUC | mC*mC*mU*GGGC | chr6: 29943143- |
| | | UCCCGGGGCA | UCCCGGGGCA | CUCUCCCGGGGC | 29943163 |
| | | | GUUUUAGAG | AGUUUUAGAmGm | |
| | | | CUAGAAAUA | CmUmAmGmAmA | |
| | | | GCAAGUUAA | mAmUmAmGmCA | |
| | | | AAUAAGGCU | AGUUAAAAUAAG | |
| | | | AGUCCGUUA | GCUAGUCCGUUA | |
| | | | UCAACUUGA | UCAmAmCmUmU | |
| | | | AAAAGUGGC | mGmAmAmAmAm | |
| | | | ACCGAGUCG | AmGmUmGmGmC | |
| | | | GUGCUUUU | mAmCmCmGmAm | |
| | | | | GmUmCmGmGmU | |
| | | | | mGmCmU*mU*mU | |
| | | | | *mU | |
| G019019 | 336 | UUUAGGCCA | UUUAGGCCA | mU*mU*mU*AGG | chr6: 29943188- |
| | | AAAAUCCCCC | AAAAUCCCCC | CCAAAAAUCCCC | 29943208 |
| | | C | CGUUUUAGA | CCGUUUUAGAmG | |
| | | | GCUAGAAAU | mCmUmAmGmAm | |
| | | | AGCAAGUUA | AmAmUmAmGmC | |
| | | | AAAUAAGGC | AAGUUAAAAUAA | |
| | | | UAGUCCGUU | GGCUAGUCCGUU | |
| | | | AUCAACUUG | AUCAmAmCmUmU | |
| | | | AAAAAGUGG | mGmAmAmAmAm | |
| | | | CACCGAGUCG | AmGmUmGmGmC | |
| | | | GUGCUUUU | mAmCmCmGmAm | |
| | | | | GmUmCmGmGmU | |
| | | | | mGmCmU*mU*mU | |
| | | | | *mU | |
| G021208 | 337 | CGCUGCAGCG | CGCUGCAGCG | mC*mG*mC*UGCA | chr6: 29943528- |
| | | CACGGGUACC | CACGGGUACC | GCGCACGGGUAC | 29943548 |
| | | | GUUUUAGAG | CGUUUUAGAmGm | |
| | | | CUAGAAAUA | CmUmAmGmAmA | |
| | | | GCAAGUUAA | mAmUmAmGmCA | |
| | | | AAUAAGGCU | AGUUAAAAUAAG | |
| | | | AGUCCGUUA | GCUAGUCCGUUA | |
| | | | UCAACUUGA | UCAmAmCmUmU | |
| | | | AAAAGUGGC | mGmAmAmAmAm | |
| | | | ACCGAGUCG | AmGmUmGmGmC | |
| | | | GUGCUUUU | mAmCmCmGmAm | |
| | | | | GmUmCmGmGmU | |
| | | | | mGmCmU*mU*mU | |
| | | | | *mU | |
| G021209 | 338 | GCUGCAGCGC | GCUGCAGCGC | mG*mC*mU*GCAG | chr6: 29943529- |
| | | ACGGGUACC | ACGGGUACC | CGCACGGGUACC | 29943549 |
| | | A | AGUUUUAGA | AGUUUUAGAmGm | |
| | | | GCUAGAAAU | CmUmAmGmAmA | |
| | | | AGCAAGUUA | mAmUmAmGmCA | |
| | | | AAAUAAGGC | AGUUAAAAUAAG | |
| | | | UAGUCCGUU | GCUAGUCCGUUA | |
| | | | AUCAACUUG | UCAmAmCmUmU | |
| | | | AAAAAGUGG | mGmAmAmAmAm | |
| | | | CACCGAGUCG | AmGmUmGmGmC | |
| | | | GUGCUUUU | mAmCmCmGmAm | |
| | | | | GmUmCmGmGmU | |
| | | | | mGmCmU*mU*mU | |
| | | | | *mU | |
| G021210 | 339 | CUGCAGCGCA | CUGCAGCGCA | mC*mU*mG*CAGC | chr6: 29943530- |
| | | CGGGUACCA | CGGGUACCA | GCACGGGUACCA | 29943550 |
| | | G | GGUUUUAGA | GGUUUUAGAmGm | |
| | | | GCUAGAAAU | CmUmAmGmAmA | |
| | | | AGCAAGUUA | mAmUmAmGmCA | |
| | | | AAAUAAGGC | AGUUAAAAUAAG | |
| | | | UAGUCCGUU | GCUAGUCCGUUA | |
| | | | AUCAACUUG | UCAmAmCmUmU | |
| | | | AAAAAGUGG | mGmAmAmAmAm | |
| | | | CACCGAGUCG | AmGmUmGmGmC | |
| | | | GUGCUUUU | mAmCmCmGmAm | |
| | | | | GmUmCmGmGmU | |
| | | | | mGmCmU*mU*mU | |
| | | | | *mU | |
| G018932 | 340 | CGCACGGGU | CGCACGGGU | mC*mG*mC*ACGG | chr6: 29943536- |
| | | ACCAGGGGCC | ACCAGGGGCC | GUACCAGGGGCC | 29943556 |
| | | A | AGUUUUAGA | AGUUUUAGAmGm | |
| | | | GCUAGAAAU | CmUmAmGmAmA | |
| | | | AGCAAGUUA | mAmUmAmGmCA | |
| | | | AAAUAAGGC | AGUUAAAAUAAG | |
| | | | UAGUCCGUU | GCUAGUCCGUUA | |
| | | | AUCAACUUG | UCAmAmCmUmU | |
| | | | AAAAAGUGG | mGmAmAmAmAm | |
| | | | CACCGAGUCG | AmGmUmGmGmC | |
| | | | GUGCUUUU | mAmCmCmGmAm | |
| | | | | GmUmCmGmGmU | |
| | | | | mGmCmU*mU*mU | |
| | | | | *mU | |
| G018933 | 341 | GCACGGGUA | GCACGGGUA | mG*mC*mA*CGGG | chr6: 29943537- |
| | | CCAGGGGCCA | CCAGGGGCCA | UACCAGGGGCCA | 29943557 |
| | | C | CGUUUUAGA | CGUUUUAGAmGm | |
| | | | GCUAGAAAU | CmUmAmGmAmA | |
| | | | AGCAAGUUA | mAmUmAmGmCA | |
| | | | AAAUAAGGC | AGUUAAAAUAAG | |
| | | | UAGUCCGUU | GCUAGUCCGUUA | |
| | | | AUCAACUUG | | |
| | | | AAAAAGUGG | UCAmAmCmUmU | |
| | | | CACCGAGUCG | mGmAmAmAmAm | |
| | | | GUGCUUUU | AmGmUmGmGmC | |
| | | | | mAmCmCmGmAm | |
| | | | | GmUmCmGmGmU | |
| | | | | mGmCmU*mU*mU | |
| | | | | *mU | |
| G018934 | 342 | CACGGGUACC | CACGGGUACC | mC*mA*mC*GGGU | chr6: 29943538- |
| | | AGGGGCCAC | AGGGGCCAC | ACCAGGGGCCAC | 29943558 |
| | | G | GGUUUUAGA | GGUUUUAGAmGm | |
| | | | GCUAGAAAU | CmUmAmGmAmA | |
| | | | AGCAAGUUA | mAmUmAmGmCA | |
| | | | AAAUAAGGC | AGUUAAAAUAAG | |
| | | | UAGUCCGUU | GCUAGUCCGUUA | |
| | | | AUCAACUUG | UCAmAmCmUmU | |
| | | | AAAAAGUGG | mGmAmAmAmAm | |
| | | | CACCGAGUCG | AmGmUmGmGmC | |
| | | | GUGCUUUU | mAmCmCmGmAm | |
| | | | | GmUmCmGmGmU | |
| | | | | mGmCmU*mU*mU | |
| | | | | *mU | |
| G018935 | 343 | GGGAGGCGC | GGGAGGCGC | mG*mG*mG*AGG | chr6: 29943549- |
| | | CCCGUGGCCC | CCCGUGGCCC | CGCCCCGUGGCC | 29943569 |
| | | C | CGUUUUAGA | CCGUUUUAGAmG | |
| | | | GCUAGAAAU | mCmUmAmGmAm | |
| | | | AGCAAGUUA | AmAmUmAmGmC | |
| | | | AAAUAAGGC | AAGUUAAAAUAA | |
| | | | UAGUCCGUU | GGCUAGUCCGUU | |
| | | | AUCAACUUG | AUCAmAmCmUmU | |
| | | | AAAAAGUGG | mGmAmAmAmAm | |
| | | | CACCGAGUCG | AmGmUmGmGmC | |
| | | | GUGCUUUU | mAmCmCmGmAm | |
| | | | | GmUmCmGmGmU | |
| | | | | mGmCmU*mU*mU | |
| | | | | *mU | |
| G018936 | 344 | GCGAUCAGG | GCGAUCAGG | mG*mC*mG*AUCA | chr6: 29943556- |
| | | GAGGCGCCCC | GAGGCGCCCC | GGGAGGCGCCCC | 29943576 |
| | | G | GGUUUUAGA | GGUUUUAGAmGm | |
| | | | GCUAGAAAU | CmUmAmGmAmA | |
| | | | AGCAAGUUA | mAmUmAmGmCA | |
| | | | AAAUAAGGC | AGUUAAAAUAAG | |
| | | | UAGUCCGUU | GCUAGUCCGUUA | |
| | | | AUCAACUUG | UCAmAmCmUmU | |
| | | | AAAAAGUGG | mGmAmAmAmAm | |
| | | | CACCGAGUCG | AmGmUmGmGmC | |
| | | | GUGCUUUU | mAmCmCmGmAm | |
| | | | | GmUmCmGmGmU | |
| | | | | mGmCmU*mU*mU | |
| | | | | *mU | |
| G021211 | 345 | UCCUUGUGG | UCCUUGUGG | mU*mC*mC*UUGU | chr6: 29943589- |
| | | GAGGCCAGCC | GAGGCCAGCC | GGGAGGCCAGCC | 29943609 |
| | | C | CGUUUUAGA | CGUUUUAGAmGm | |
| | | | GCUAGAAAU | CmUmAmGmAmA | |
| | | | AGCAAGUUA | mAmUmAmGmCA | |
| | | | AAAUAAGGC | AGUUAAAAUAAG | |
| | | | UAGUCCGUU | GCUAGUCCGUUA | |
| | | | AUCAACUUG | UCAmAmCmUmU | |
| | | | AAAAAGUGG | mGmAmAmAmAm | |
| | | | CACCGAGUCG | AmGmUmGmGmC | |
| | | | GUGCUUUU | mAmCmCmGmAm | |
| | | | | GmUmCmGmGmU | |
| | | | | mGmCmU*mU*mU | |
| | | | | *mU | |
| G018938 | 346 | CUCCUUGUG | CUCCUUGUG | mC*mU*mC*CUUG | chr6: 29943590- |
| | | GGAGGCCAG | GGAGGCCAG | UGGGAGGCCAGC | 29943610 |
| | | CC | CCGUUUUAG | CGUUUUAGAmGm | |
| | | | AGCUAGAAA | CmUmAmGmAmA | |
| | | | UAGCAAGUU | mAmUmAmGmCA | |
| | | | AAAAUAAGG | AGUUAAAAUAAG | |
| | | | CUAGUCCGU | GCUAGUCCGUUA | |
| | | | UAUCAACUU | UCAmAmCmUmU | |
| | | | GAAAAAGUG | mGmAmAmAmAm | |
| | | | GCACCGAGUC | AmGmUmGmGmC | |
| | | | GGUGCUUUU | mAmCmCmGmAm | |
| | | | | GmUmCmGmGmU | |
| | | | | mGmCmU*mU*mU | |
| | | | | *mU | |
| G018939 | 347 | GGCUGGCCUC | GGCUGGCCUC | mG*mG*mC*UGGC | chr6: 29943590- |
| | | CCACAAGGA | CCACAAGGA | CUCCCACAAGGA | 29943610 |
| | | G | GGUUUUAGA | GGUUUUAGAmGm | |
| | | | GCUAGAAAU | CmUmAmGmAmA | |
| | | | AGCAAGUUA | mAmUmAmGmCA | |
| | | | AAAUAAGGC | AGUUAAAAUAAG | |
| | | | UAGUCCGUU | GCUAGUCCGUUA | |
| | | | AUCAACUUG | UCAmAmCmUmU | |
| | | | AAAAAGUGG | mGmAmAmAmAm | |
| | | | CACCGAGUCG | AmGmUmGmGmC | |
| | | | GUGCUUUU | mAmCmCmGmAm | |
| | | | | GmUmCmGmGmU | |
| | | | | mGmCmU*mU*mU | |
| | | | | *mU | |
| G018940 | 348 | UUGUCUCCCC | UUGUCUCCCC | mU*mU*mG*UCUC | chr6: 29943599- |
| | | UCCUUGUGG | UCCUUGUGG | CCCUCCUUGUGG | 29943619 |
| | | G | GGUUUUAGA | GGUUUUAGAmGm | |
| | | | GCUAGAAAU | CmUmAmGmAmA | |
| | | | AGCAAGUUA | mAmUmAmGmCA | |
| | | | AAAUAAGGC | AGUUAAAAUAAG | |
| | | | UAGUCCGUU | GCUAGUCCGUUA | |
| | | | AUCAACUUG | UCAmAmCmUmU | |
| | | | AAAAAGUGG | mGmAmAmAmAm | |
| | | | CACCGAGUCG | AmGmUmGmGmC | |
| | | | GUGCUUUU | mAmCmCmGmAm | |
| | | | | GmUmCmGmGmU | |
| | | | | mGmCmU*mU*mU | |
| | | | | *mU | |
| G018941 | 349 | CCACAAGGA | CCACAAGGA | mC*mC*mA*CAAG | chr6: 29943600- |
| | | GGGGAGACA | GGGGAGACA | GAGGGGAGACAA | 29943620 |
| | | AU | AUGUUUUAG | UGUUUUAGAmGm | |
| | | | AGCUAGAAA | CmUmAmGmAmA | |
| | | | UAGCAAGUU | mAmUmAmGmCA | |
| | | | AAAAUAAGG | AGUUAAAAUAAG | |
| | | | CUAGUCCGU | GCUAGUCCGUUA | |
| | | | UAUCAACUU | UCAmAmCmUmU | |
| | | | GAAAAAGUG | mGmAmAmAmAm | |
| | | | GCACCGAGUC | AmGmUmGmGmC | |
| | | | GGUGCUUUU | mAmCmCmGmAm | |
| | | | | GmUmCmGmGmU | |
| | | | | mGmCmU*mU*mU | |
| | | | | *mU | |
| G018942 | 350 | CACAAGGAG | CACAAGGAG | mC*mA*mC*AAGG | chr6: 29943601- |
| | | GGGAGACAA | GGGAGACAA | AGGGGAGACAAU | 29943621 |
| | | UU | UUGUUUUAG | UGUUUUAGAmGm | |
| | | | AGCUAGAAA | CmUmAmGmAmA | |
| | | | UAGCAAGUU | mAmUmAmGmCA | |
| | | | AAAAUAAGG | AGUUAAAAUAAG | |
| | | | CUAGUCCGU | GCUAGUCCGUUA | |
| | | | UAUCAACUU | UCAmAmCmUmU | |
| | | | GAAAAAGUG | mGmAmAmAmAm | |
| | | | GCACCGAGUC | AmGmUmGmGmC | |
| | | | GGUGCUUUU | mAmCmCmGmAm | |
| | | | | GmUmCmGmGmU | |
| | | | | mGmCmU*mU*mU | |
| | | | | *mU | |
| G018943 | 351 | CAAUUGUCU | CAAUUGUCU | mC*mA*mA*UUG | chr6: 29943602- |
| | | CCCCUCCUUG | CCCCUCCUUG | UCUCCCCUCCUU | 29943622 |
| | | U | UGUUUUAGA | GUGUUUUAGAmG | |
| | | | GCUAGAAAU | mCmUmAmGmAm | |
| | | | AGCAAGUUA | AmAmUmAmGmC | |
| | | | AAAUAAGGC | AAGUUAAAAUAA | |
| | | | UAGUCCGUU | GGCUAGUCCGUU | |
| | | | AUCAACUUG | AUCAmAmCmUmU | |
| | | | AAAAAGUGG | mGmAmAmAmAm | |
| | | | CACCGAGUCG | AmGmUmGmGmC | |
| | | | GUGCUUUU | mAmCmCmGmAm | |
| | | | | GmUmCmGmGmU | |
| | | | | mGmCmU*mU*mU | |
| | | | | *mU | |
| G018944 | 352 | CCAAUUGUC | CCAAUUGUC | mC*mC*mA*AUUG | chr6: 29943603- |
| | | UCCCCUCCUU | UCCCCUCCUU | UCUCCCCUCCUU | 29943623 |
| | | G | GGUUUUAGA | GGUUUUAGAmGm | |
| | | | GCUAGAAAU | CmUmAmGmAmA | |
| | | | AGCAAGUUA | mAmUmAmGmCA | |
| | | | AAAUAAGGC | AGUUAAAAUAAG | |
| | | | UAGUCCGUU | GCUAGUCCGUUA | |
| | | | AUCAACUUG | UCAmAmCmUmU | |
| | | | AAAAAGUGG | mGmAmAmAmAm | |
| | | | CACCGAGUCG | AmGmUmGmGmC | |
| | | | GUGCUUUU | mAmCmCmGmAm | |
| | | | | GmUmCmGmGmU | |
| | | | | mGmCmU*mU*mU | |
| | | | | *mU | |
| G018945 | 353 | AUCCCUCGAA | AUCCCUCGAA | mA*mU*mC*CCUC | chr6: 29943774- |
| | | UACUGAUGA | UACUGAUGA | GAAUACUGAUGA | 29943794 |
| | | G | GGUUUUAGA | GGUUUUAGAmGm | |
| | | | GCUAGAAAU | CmUmAmGmAmA | |
| | | | AGCAAGUUA | mAmUmAmGmCA | |
| | | | AAAUAAGGC | AGUUAAAAUAAG | |
| | | | UAGUCCGUU | GCUAGUCCGUUA | |
| | | | AUCAACUUG | UCAmAmCmUmU | |
| | | | AAAAAGUGG | mGmAmAmAmAm | |
| | | | CACCGAGUCG | AmGmUmGmGmC | |
| | | | GUGCUUUU | mAmCmCmGmAm | |
| | | | | GmUmCmGmGmU | |
| | | | | mGmCmU*mU*mU | |
| | | | | *mU | |
| G018946 | 354 | AACCACUCAU | AACCACUCAU | mA*mA*mC*CACU | chr6: 29943779- |
| | | CAGUAUUCG | CAGUAUUCG | CAUCAGUAUUCG | 29943799 |
| | | A | AGUUUUAGA | AGUUUUAGAmGm | |
| | | | GCUAGAAAU | CmUmAmGmAmA | |
| | | | AGCAAGUUA | mAmUmAmGmCA | |
| | | | AAAUAAGGC | AGUUAAAAUAAG | |
| | | | UAGUCCGUU | GCUAGUCCGUUA | |
| | | | AUCAACUUG | UCAmAmCmUmU | |
| | | | AAAAAGUGG | mGmAmAmAmAm | |
| | | | CACCGAGUCG | AmGmUmGmGmC | |
| | | | GUGCUUUU | mAmCmCmGmAm | |
| | | | | GmUmCmGmGmU | |
| | | | | mGmCmU*mU*mU | |
| | | | | *mU | |
| G018947 | 355 | GAACCACUCA | GAACCACUCA | mG*mA*mA*CCAC | chr6: 29943780- |
| | | UCAGUAUUC | UCAGUAUUC | UCAUCAGUAUUC | 29943800 |
| | | G | GGUUUUAGA | GGUUUUAGAmGm | |
| | | | GCUAGAAAU | CmUmAmGmAmA | |
| | | | AGCAAGUUA | mAmUmAmGmCA | |
| | | | AAAUAAGGC | AGUUAAAAUAAG | |
| | | | UAGUCCGUU | GCUAGUCCGUUA | |
| | | | AUCAACUUG | UCAmAmCmUmU | |
| | | | AAAAAGUGG | mGmAmAmAmAm | |
| | | | CACCGAGUCG | AmGmUmGmGmC | |
| | | | GUGCUUUU | mAmCmCmGmAm | |
| | | | | GmUmCmGmGmU | |
| | | | | mGmCmU*mU*mU | |
| | | | | *mU | |
| G018948 | 356 | GAGGAAAAG | GAGGAAAAG | mG*mA*mG*GAA | chr6: 29943822- |
| | | UCACGGGCCC | UCACGGGCCC | AAGUCACGGGCC | 29943842 |
| | | A | AGUUUUAGA | CAGUUUUAGAmG | |
| | | | GCUAGAAAU | mCmUmAmGmAm | |
| | | | AGCAAGUUA | AmAmUmAmGmC | |
| | | | AAAUAAGGC | AAGUUAAAAUAA | |
| | | | UAGUCCGUU | GGCUAGUCCGUU | |
| | | | AUCAACUUG | AUCAmAmCmUmU | |
| | | | AAAAAGUGG | mGmAmAmAmAm | |
| | | | CACCGAGUCG | AmGmUmGmGmC | |
| | | | GUGCUUUU | mAmCmCmGmAm | |
| | | | | GmUmCmGmGmU | |
| | | | | mGmCmU*mU*mU | |
| | | | | *mU | |
| G018949 | 357 | GGCCCGUGAC | GGCCCGUGAC | mG*mG*mC*CCGU | chr6: 29943824- |
| | | UUUUCCUCUC | UUUUCCUCUC | GACUUUUCCUCU | 29943844 |
| | | | GUUUUAGAG | CGUUUUAGAmGm | |
| | | | CUAGAAAUA | CmUmAmGmAmA | |
| | | | GCAAGUUAA | mAmUmAmGmCA | |
| | | | AAUAAGGCU | AGUUAAAAUAAG | |
| | | | AGUCCGUUA | GCUAGUCCGUUA | |
| | | | UCAACUUGA | UCAmAmCmUmU | |
| | | | AAAAGUGGC | mGmAmAmAmAm | |
| | | | ACCGAGUCG | AmGmUmGmGmC | |
| | | | GUGCUUUU | mAmCmCmGmAm | |
| | | | | GmUmCmGmGmU | |
| | | | | mGmCmU*mU*mU | |
| | | | | *mU | |
| G018950 | 358 | UGCUUCACAC | UGCUUCACAC | mU*mG*mC*UUCA | chr6: 29943857- |
| | | UCAAUGUGU | UCAAUGUGU | CACUCAAUGUGU | 29943877 |
| | | G | GGUUUUAGA | GGUUUUAGAmGm | |
| | | | GCUAGAAAU | CmUmAmGmAmA | |
| | | | AGCAAGUUA | mAmUmAmGmCA | |
| | | | AAAUAAGGC | AGUUAAAAUAAG | |
| | | | UAGUCCGUU | GCUAGUCCGUUA | |
| | | | AUCAACUUG | UCAmAmCmUmU | |
| | | | AAAAAGUGG | mGmAmAmAmAm | |
| | | | CACCGAGUCG | AmGmUmGmGmC | |
| | | | GUGCUUUU | mAmCmCmGmAm | |
| | | | | GmUmCmGmGmU | |
| | | | | mGmCmU*mU*mU | |
| | | | | *mU | |
| G018951 | 359 | GCUUCACACU | GCUUCACACU | mG*mC*mU*UCAC | chr6: 29943858- |
| | | CAAUGUGUG | CAAUGUGUG | ACUCAAUGUGUG | 29943878 |
| | | U | UGUUUUAGA | UGUUUUAGAmGm | |
| | | | GCUAGAAAU | CmUmAmGmAmA | |
| | | | AGCAAGUUA | mAmUmAmGmCA | |
| | | | AAAUAAGGC | AGUUAAAAUAAG | |
| | | | UAGUCCGUU | GCUAGUCCGUUA | |
| | | | AUCAACUUG | UCAmAmCmUmU | |
| | | | AAAAAGUGG | mGmAmAmAmAm | |
| | | | CACCGAGUCG | AmGmUmGmGmC | |
| | | | GUGCUUUU | mAmCmCmGmAm | |
| | | | | GmUmCmGmGmU | |
| | | | | mGmCmU*mU*mU | |
| | | | | *mU | |
| G018952 | 360 | CUUCACACUC | CUUCACACUC | mC*mU*mU*CACA | chr6: 29943859- |
| | | AAUGUGUGU | AAUGUGUGU | CUCAAUGUGUGU | 29943879 |
| | | G | GGUUUUAGA | GGUUUUAGAmGm | |
| | | | GCUAGAAAU | CmUmAmGmAmA | |
| | | | AGCAAGUUA | mAmUmAmGmCA | |
| | | | AAAUAAGGC | AGUUAAAAUAAG | |
| | | | UAGUCCGUU | GCUAGUCCGUUA | |
| | | | AUCAACUUG | UCAmAmCmUmU | |
| | | | AAAAAGUGG | mGmAmAmAmAm | |
| | | | CACCGAGUCG | AmGmUmGmGmC | |
| | | | GUGCUUUU | mAmCmCmGmAm | |
| | | | | GmUmCmGmGmU | |
| | | | | mGmCmU*mU*mU | |
| | | | | *mU | |
| G018953 | 361 | UUCACACUCA | UUCACACUCA | mU*mU*mC*ACAC | chr6: 29943860- |
| | | AUGUGUGUG | AUGUGUGUG | UCAAUGUGUGUG | 29943880 |
| | | G | GGUUUUAGA | GGUUUUAGAmGm | |
| | | | GCUAGAAAU | CmUmAmGmAmA | |
| | | | AGCAAGUUA | mAmUmAmGmCA | |
| | | | AAAUAAGGC | AGUUAAAAUAAG | |
| | | | UAGUCCGUU | GCUAGUCCGUUA | |
| | | | AUCAACUUG | UCAmAmCmUmU | |
| | | | AAAAAGUGG | mGmAmAmAmAm | |
| | | | CACCGAGUCG | AmGmUmGmGmC | |
| | | | GUGCUUUU | mAmCmCmGmAm | |
| | | | | GmUmCmGmGmU | |
| | | | | mGmCmU*mU*mU | |
| | | | | *mU | |
| G018954 | 362 | UUGAGAAUG | UUGAGAAUG | mU*mU*mG*AGA | chr6: 29944026- |
| | | GACAGGACA | GACAGGACA | AUGGACAGGACA | 29944046 |
| | | CC | CCGUUUUAG | CCGUUUUAGAmG | |
| | | | AGCUAGAAA | mCmUmAmGmAm | |
| | | | UAGCAAGUU | AmAmUmAmGmC | |
| | | | AAAAUAAGG | AAGUUAAAAUAA | |
| | | | CUAGUCCGU | GGCUAGUCCGUU | |
| | | | UAUCAACUU | AUCAmAmCmUmU | |
| | | | GAAAAAGUG | mGmAmAmAmAm | |
| | | | GCACCGAGUC | AmGmUmGmGmC | |
| | | | GGUGCUUUU | mAmCmCmGmAm | |
| | | | | GmUmCmGmGmU | |
| | | | | mGmCmU*mU*mU | |
| | | | | *mU | |
| G021205 | 363 | AGGCAUUUU | AGGCAUUUU | mA*mG*mG*CAU | chr6: 29944077- |
| | | GCAUCUGUC | GCAUCUGUC | UUUGCAUCUGUC | 29944097 |
| | | AU | AUGUUUUAG | AUGUUUUAGAmG | |
| | | | AGCUAGAAA | mCmUmAmGmAm | |
| | | | UAGCAAGUU | AmAmUmAmGmC | |
| | | | AAAAUAAGG | AAGUUAAAAUAA | |
| | | | CUAGUCCGU | GGCUAGUCCGUU | |
| | | | UAUCAACUU | AUCAmAmCmUmU | |
| | | | GAAAAAGUG | mGmAmAmAmAm | |
| | | | GCACCGAGUC | AmGmUmGmGmC | |
| | | | GGUGCUUUU | mAmCmCmGmAm | |
| | | | | GmUmCmGmGmU | |
| | | | | mGmCmU*mU*mU | |
| | | | | *mU | |
| G021206 | 364 | CAGGCAUUU | CAGGCAUUU | mC*mA*mG*GCAU | chr6: 29944078- |
| | | UGCAUCUGU | UGCAUCUGU | UUUGCAUCUGUC | 29944098 |
| | | CA | CAGUUUUAG | AGUUUUAGAmGm | |
| | | | AGCUAGAAA | CmUmAmGmAmA | |
| | | | UAGCAAGUU | mAmUmAmGmCA | |
| | | | AAAAUAAGG | AGUUAAAAUAAG | |
| | | | CUAGUCCGU | GCUAGUCCGUUA | |
| | | | UAUCAACUU | UCAmAmCmUmU | |
| | | | GAAAAAGUG | mGmAmAmAmAm | |
| | | | GCACCGAGUC | AmGmUmGmGmC | |
| | | | GGUGCUUUU | mAmCmCmGmAm | |
| | | | | GmUmCmGmGmU | |
| | | | | mGmCmU*mU*mU | |
| | | | | *mU | |
| G018955 | 365 | AGGGGCCCU | AGGGGCCCU | mA*mG*mG*GGCC | chr6: 29944458- |
| | | GACCCUGCUA | GACCCUGCUA | CUGACCCUGCUA | 29944478 |
| | | A | AGUUUUAGA | AGUUUUAGAmGm | |
| | | | GCUAGAAAU | CmUmAmGmAmA | |
| | | | AGCAAGUUA | mAmUmAmGmCA | |
| | | | AAAUAAGGC | AGUUAAAAUAAG | |
| | | | UAGUCCGUU | GCUAGUCCGUUA | |
| | | | AUCAACUUG | UCAmAmCmUmU | |
| | | | AAAAAGUGG | mGmAmAmAmAm | |
| | | | CACCGAGUCG | AmGmUmGmGmC | |
| | | | GUGCUUUU | mAmCmCmGmAm | |
| | | | | GmUmCmGmGmU | |
| | | | | mGmCmU*mU*mU | |
| | | | | *mU | |
| G018956 | 366 | UGGGAAAAG | UGGGAAAAG | mU*mG*mG*GAA | chr6: 29944478- |
| | | AGGGGAAGG | AGGGGAAGG | AAGAGGGGAAGG | 29944498 |
| | | UG | UGGUUUUAG | UGGUUUUAGAmG | |
| | | | AGCUAGAAA | mCmUmAmGmAm | |
| | | | UAGCAAGUU | AmAmUmAmGmC | |
| | | | AAAAUAAGG | AAGUUAAAAUAA | |
| | | | CUAGUCCGU | GGCUAGUCCGUU | |
| | | | UAUCAACUU | AUCAmAmCmUmU | |
| | | | GAAAAAGUG | mGmAmAmAmAm | |
| | | | GCACCGAGUC | AmGmUmGmGmC | |
| | | | GGUGCUUUU | mAmCmCmGmAm | |
| | | | | GmUmCmGmGmU | |
| | | | | mGmCmU*mU*mU | |
| | | | | *mU | |
| G018957 | 367 | UGGAGGAGG | UGGAGGAGG | mU*mG*mG*AGG | chr6: 29944597- |
| | | AAGAGCUCA | AAGAGCUCA | AGGAAGAGCUCA | 29944617 |
| | | GG | GGGUUUUAG | GGGUUUUAGAmG | |
| | | | AGCUAGAAA | mCmUmAmGmAm | |
| | | | UAGCAAGUU | AmAmUmAmGmC | |
| | | | AAAAUAAGG | AAGUUAAAAUAA | |
| | | | CUAGUCCGU | GGCUAGUCCGUU | |
| | | | UAUCAACUU | AUCAmAmCmUmU | |
| | | | GAAAAAGUG | mGmAmAmAmAm | |
| | | | GCACCGAGUC | AmGmUmGmGmC | |
| | | | GGUGCUUUU | mAmCmCmGmAm | |
| | | | | GmUmCmGmGmU | |
| | | | | mGmCmU*mU*mU | |
| | | | | *mU | |
| G018958 | 368 | UGAGAUUUC | UGAGAUUUC | mU*mG*mA*GAU | chr6: 29944642- |
| | | UUGUCUCAC | UUGUCUCAC | UUCUUGUCUCAC | 29944662 |
| | | UG | UGGUUUUAG | UGGUUUUAGAmG | |
| | | | AGCUAGAAA | mCmUmAmGmAm | |
| | | | UAGCAAGUU | AmAmUmAmGmC | |
| | | | AAAAUAAGG | AAGUUAAAAUAA | |
| | | | CUAGUCCGU | GGCUAGUCCGUU | |
| | | | UAUCAACUU | AUCAmAmCmUmU | |
| | | | GAAAAAGUG | mGmAmAmAmAm | |
| | | | GCACCGAGUC | AmGmUmGmGmC | |
| | | | GGUGCUUUU | mAmCmCmGmAm | |
| | | | | GmUmCmGmGmU | |
| | | | | mGmCmU*mU*mU | |
| | | | | *mU | |
| G018959 | 369 | GAGAUUUCU | GAGAUUUCU | mG*mA*mG*AUU | chr6: 29944643- |
| | | UGUCUCACU | UGUCUCACU | UCUUGUCUCACU | 29944663 |
| | | GA | GAGUUUUAG | GAGUUUUAGAmG | |
| | | | AGCUAGAAA | mCmUmAmGmAm | |
| | | | UAGCAAGUU | AmAmUmAmGmC | |
| | | | AAAAUAAGG | AAGUUAAAAUAA | |
| | | | CUAGUCCGU | GGCUAGUCCGUU | |
| | | | UAUCAACUU | AUCAmAmCmUmU | |
| | | | GAAAAAGUG | mGmAmAmAmAm | |
| | | | GCACCGAGUC | AmGmUmGmGmC | |
| | | | GGUGCUUUU | mAmCmCmGmAm | |
| | | | | GmUmCmGmGmU | |
| | | | | mGmCmU*mU*mU | |
| | | | | *mU | |
| G018960 | 370 | UAAAGCACC | UAAAGCACC | mU*mA*mA*AGC | chr6: 29944772- |
| | | UGUUAAAAU | UGUUAAAAU | ACCUGUUAAAAU | 29944792 |
| | | GA | GAGUUUUAG | GAGUUUUAGAmG | |
| | | | AGCUAGAAA | mCmUmAmGmAm | |
| | | | UAGCAAGUU | AmAmUmAmGmC | |
| | | | AAAAUAAGG | AAGUUAAAAUAA | |
| | | | CUAGUCCGU | GGCUAGUCCGUU | |
| | | | UAUCAACUU | AUCAmAmCmUmU | |
| | | | GAAAAAGUG | mGmAmAmAmAm | |
| | | | GCACCGAGUC | AmGmUmGmGmC | |
| | | | GGUGCUUUU | mAmCmCmGmAm | |
| | | | | GmUmCmGmGmU | |
| | | | | mGmCmU*mU*mU | |
| | | | | *mU | |
| G018961 | 371 | AAUCUGUCC | AAUCUGUCC | mA*mA*mU*CUG | chr6: 29944782- |
| | | UUCAUUUUA | UUCAUUUUA | UCCUUCAUUUUA | 29944802 |
| | | AC | ACGUUUUAG | ACGUUUUAGAmG | |
| | | | AGCUAGAAA | mCmUmAmGmAm | |
| | | | UAGCAAGUU | AmAm UmAmGmC | |
| | | | AAAAUAAGG | AAGUUAAAAUAA | |
| | | | CUAGUCCGU | GGCUAGUCCGUU | |
| | | | UAUCAACUU | AUCAmAmCmUmU | |
| | | | GAAAAAGUG | mGmAmAmAmAm | |
| | | | GCACCGAGUC | AmGmUmGmGmC | |
| | | | GGUGCUUUU | mAmCmCmGmAm | |
| | | | | GmUmCmGmGmU | |
| | | | | mGmCmU*mU*mU | |
| | | | | *mU | |
| G018962 | 372 | GUCACAGGG | GUCACAGGG | mG*mU*mC*ACAG | chr6: 29944850- |
| | | GAAGGUCCC | GAAGGUCCC | GGGAAGGUCCCU | 29944870 |
| | | UG | UGGUUUUAG | GGUUUUAGAmGm | |
| | | | AGCUAGAAA | CmUmAmGmAmA | |
| | | | UAGCAAGUU | mAmUmAmGmCA | |
| | | | AAAAUAAGG | AGUUAAAAUAAG | |
| | | | CUAGUCCGU | GCUAGUCCGUUA | |
| | | | UAUCAACUU | UCAmAmCmUmU | |
| | | | GAAAAAGUG | mGmAmAmAmAm | |
| | | | GCACCGAGUC | AmGmUmGmGmC | |
| | | | GGUGCUUUU | mAmCmCmGmAm | |
| | | | | GmUmCmGmGmU | |
| | | | | mGmCmU*mU*mU | |
| | | | | *mU | |
| G018964 | 373 | AAACAUGAA | AAACAUGAA | mA*mA*mA*CAU | chr6: 29944907- |
| | | GAAAGCAGG | GAAAGCAGG | GAAGAAAGCAGG | 29944927 |
| | | UG | UGGUUUUAG | UGGUUUUAGAmG | |
| | | | AGCUAGAAA | mCmUmAmGmAm | |
| | | | UAGCAAGUU | AmAmUmAmGmC | |
| | | | AAAAUAAGG | AAGUUAAAAUAA | |
| | | | CUAGUCCGU | GGCUAGUCCGUU | |
| | | | UAUCAACUU | AUCAmAmCmUmU | |
| | | | GAAAAAGUG | mGmAmAmAmAm | |
| | | | GCACCGAGUC | AmGmUmGmGmC | |
| | | | GGUGCUUUU | mAmCmCmGmAm | |
| | | | | GmUmCmGmGmU | |
| | | | | mGmCmU*mU*mU | |
| | | | | *mU | |
| G018966 | 374 | UGUCCUGUG | UGUCCUGUG | mU*mG*mU*CCUG | chr6: 29945024- |
| | | AGAUACCAG | AGAUACCAG | UGAGAUACCAGA | 29945044 |
| | | AA | AAGUUUUAG | AGUUUUAGAmGm | |
| | | | AGCUAGAAA | CmUmAmGmAmA | |
| | | | UAGCAAGUU | mAmUmAmGmCA | |
| | | | AAAAUAAGG | AGUUAAAAUAAG | |
| | | | CUAGUCCGU | GCUAGUCCGUUA | |
| | | | UAUCAACUU | UCAmAmCmUmU | |
| | | | GAAAAAGUG | mGmAmAmAmAm | |
| | | | GCACCGAGUC | AmGmUmGmGmC | |
| | | | GGUGCUUUU | mAmCmCmGmAm | |
| | | | | GmUmCmGmGmU | |
| | | | | mGmCmU*mU*mU | |
| | | | | *mU | |
| G018967 | 375 | AUGAAGGAG | AUGAAGGAG | mA*mU*mG*AAG | chr6: 29945097- |
| | | GCUGAUGCC | GCUGAUGCC | GAGGCUGAUGCC | 29945117 |
| | | UG | UGGUUUUAG | UGGUUUUAGAmG | |
| | | | AGCUAGAAA | mCmUmAmGmAm | |
| | | | UAGCAAGUU | AmAmUmAmGmC | |
| | | | AAAAUAAGG | AAGUUAAAAUAA | |
| | | | CUAGUCCGU | GGCUAGUCCGUU | |
| | | | UAUCAACUU | AUCAmAmCmUmU | |
| | | | GAAAAAGUG | mGmAmAmAmAm | |
| | | | GCACCGAGUC | AmGmUmGmGmC | |
| | | | GGUGCUUUU | mAmCmCmGmAm | |
| | | | | GmUmCmGmGmU | |
| | | | | mGmCmU*mU*mU | |
| | | | | *mU | |
| G018968 | 376 | AGGCUGAUG | AGGCUGAUG | mA*mG*mG*CUG | chr6: 29945104- |
| | | CCUGAGGUCC | CCUGAGGUCC | AUGCCUGAGGUC | 29945124 |
| | | U | UGUUUUAGA | CUGUUUUAGAmG | |
| | | | GCUAGAAAU | mCmUmAmGmAm | |
| | | | AGCAAGUUA | AmAm UmAmGmC | |
| | | | AAAUAAGGC | AAGUUAAAAUAA | |
| | | | UAGUCCGUU | GGCUAGUCCGUU | |
| | | | AUCAACUUG | AUCAmAmCmUmU | |
| | | | AAAAAGUGG | mGmAmAmAmAm | |
| | | | CACCGAGUCG | AmGmUmGmGmC | |
| | | | GUGCUUUU | mAmCmCmGmAm | |
| | | | | GmUmCmGmGmU | |
| | | | | mGmCmU*mU*mU | |
| | | | | *mU | |
| G018969 | 377 | GGCUGAUGC | GGCUGAUGC | mG*mG*mC*UGA | chr6: 29945105- |
| | | CUGAGGUCC | CUGAGGUCC | UGCCUGAGGUCC | 29945125 |
| | | UU | UUGUUUUAG | UUGUUUUAGAmG | |
| | | | AGCUAGAAA | mCmUmAmGmAm | |
| | | | UAGCAAGUU | AmAmUmAmGmC | |
| | | | AAAAUAAGG | AAGUUAAAAUAA | |
| | | | CUAGUCCGU | GGCUAGUCCGUU | |
| | | | UAUCAACUU | AUCAmAmCmUmU | |
| | | | GAAAAAGUG | mGmAmAmAmAm | |
| | | | GCACCGAGUC | AmGmUmGmGmC | |
| | | | GGUGCUUUU | mAmCmCmGmAm | |
| | | | | GmUmCmGmGmU | |
| | | | | mGmCmU*mU*mU | |
| | | | | *mU | |
| G018970 | 378 | CACAAUAUCC | CACAAUAUCC | mC*mA*mC*AAUA | chr6: 29945116- |
| | | CAAGGACCUC | CAAGGACCUC | UCCCAAGGACCU | 29945136 |
| | | | GUUUUAGAG | CGUUUUAGAmGm | |
| | | | CUAGAAAUA | CmUmAmGmAmA | |
| | | | GCAAGUUAA | mAmUmAmGmCA | |
| | | | AAUAAGGCU | AGUUAAAAUAAG | |
| | | | AGUCCGUUA | GCUAGUCCGUUA | |
| | | | UCAACUUGA | UCAmAmCmUmU | |
| | | | AAAAGUGGC | mGmAmAmAmAm | |
| | | | ACCGAGUCG | AmGmUmGmGmC | |
| | | | GUGCUUUU | mAmCmCmGmAm | |
| | | | | GmUmCmGmGmU | |
| | | | | mGmCmU*mU*mU | |
| | | | | *mU | |
| G018971 | 379 | GGUCCUUGG | GGUCCUUGG | mG*mG*mU*CCUU | chr6: 29945118- |
| | | GAUAUUGUG | GAUAUUGUG | GGGAUAUUGUGU | 29945138 |
| | | UU | UUGUUUUAG | UGUUUUAGAmGm | |
| | | | AGCUAGAAA | CmUmAmGmAmA | |
| | | | UAGCAAGUU | mAmUmAmGmCA | |
| | | | AAAAUAAGG | AGUUAAAAUAAG | |
| | | | CUAGUCCGU | GCUAGUCCGUUA | |
| | | | UAUCAACUU | UCAmAmCmUmU | |
| | | | GAAAAAGUG | mGmAmAmAmAm | |
| | | | GCACCGAGUC | AmGmUmGmGmC | |
| | | | GGUGCUUUU | mAmCmCmGmAm | |
| | | | | GmUmCmGmGmU | |
| | | | | mGmCmU*mU*mU | |
| | | | | *mU | |
| G018972 | 380 | GUCCUUGGG | GUCCUUGGG | mG*mU*mC*CUUG | chr6: 29945119- |
| | | AUAUUGUGU | AUAUUGUGU | GGAUAUUGUGUU | 29945139 |
| | | UU | UUGUUUUAG | UGUUUUAGAmGm | |
| | | | AGCUAGAAA | CmUmAmGmAmA | |
| | | | UAGCAAGUU | mAmUmAmGmCA | |
| | | | AAAAUAAGG | AGUUAAAAUAAG | |
| | | | CUAGUCCGU | GCUAGUCCGUUA | |
| | | | UAUCAACUU | UCAmAmCmUmU | |
| | | | GAAAAAGUG | mGmAmAmAmAm | |
| | | | GCACCGAGUC | AmGmUmGmGmC | |
| | | | GGUGCUUUU | mAmCmCmGmAm | |
| | | | | GmUmCmGmGmU | |
| | | | | mGmCmU*mU*mU | |
| | | | | *mU | |
| G018973 | 381 | CUCCCAAACA | CUCCCAAACA | mC*mU*mC*CCAA | chr6: 29945124- |
| | | CAAUAUCCCA | CAAUAUCCCA | ACACAAUAUCCC | 29945144 |
| | | | GUUUUAGAG | AGUUUUAGAmGm | |
| | | | CUAGAAAUA | CmUmAmGmAmA | |
| | | | GCAAGUUAA | mAmUmAmGmCA | |
| | | | AAUAAGGCU | AGUUAAAAUAAG | |
| | | | AGUCCGUUA | GCUAGUCCGUUA | |
| | | | UCAACUUGA | UCAmAmCmUmU | |
| | | | AAAAGUGGC | mGmAmAmAmAm | |
| | | | ACCGAGUCG | AmGmUmGmGmC | |
| | | | GUGCUUUU | mAmCmCmGmAm | |
| | | | | GmUmCmGmGmU | |
| | | | | mGmCmU*mU*mU | |
| | | | | *mU | |
| G018974 | 382 | UCCUCUAGCC | UCCUCUAGCC | mU*mC*mC*UCUA | chr6: 29945176- |
| | | ACAUCUUCU | ACAUCUUCU | GCCACAUCUUCU | 29945196 |
| | | G | GGUUUUAGA | GGUUUUAGAmGm | |
| | | | GCUAGAAAU | CmUmAmGmAmA | |
| | | | AGCAAGUUA | mAmUmAmGmCA | |
| | | | AAAUAAGGC | AGUUAAAAUAAG | |
| | | | UAGUCCGUU | GCUAGUCCGUUA | |
| | | | AUCAACUUG | UCAmAmCmUmU | |
| | | | AAAAAGUGG | mGmAmAmAmAm | |
| | | | CACCGAGUCG | AmGmUmGmGmC | |
| | | | GUGCUUUU | mAmCmCmGmAm | |
| | | | | GmUmCmGmGmU | |
| | | | | mGmCmU*mU*mU | |
| | | | | *mU | |
| G018975 | 383 | ACAGAAGAU | ACAGAAGAU | mA*mC*mA*GAA | chr6: 29945177- |
| | | GUGGCUAGA | GUGGCUAGA | GAUGUGGCUAGA | 29945197 |
| | | GG | GGGUUUUAG | GGGUUUUAGAmG | |
| | | | AGCUAGAAA | mCmUmAmGmAm | |
| | | | UAGCAAGUU | AmAmUmAmGmC | |
| | | | AAAAUAAGG | AAGUUAAAAUAA | |
| | | | CUAGUCCGU | GGCUAGUCCGUU | |
| | | | UAUCAACUU | AUCAmAmCmUmU | |
| | | | GAAAAAGUG | mGmAmAmAmAm | |
| | | | GCACCGAGUC | AmGmUmGmGmC | |
| | | | GGUGCUUUU | mAmCmCmGmAm | |
| | | | | GmUmCmGmGmU | |
| | | | | mGmCmU*mU*mU | |
| | | | | *mU | |
| G018976 | 384 | CCUCUAGCCA | CCUCUAGCCA | mC*mC*mU*CUAG | chr6: 29945177- |
| | | CAUCUUCUG | CAUCUUCUG | CCACAUCUUCUG | 29945197 |
| | | U | UGUUUUAGA | UGUUUUAGAmGm | |
| | | | GCUAGAAAU | CmUmAmGmAmA | |
| | | | AGCAAGUUA | mAmUmAmGmCA | |
| | | | AAAUAAGGC | AGUUAAAAUAAG | |
| | | | UAGUCCGUU | GCUAGUCCGUUA | |
| | | | AUCAACUUG | UCAmAmCmUmU | |
| | | | AAAAAGUGG | mGmAmAmAmAm | |
| | | | CACCGAGUCG | AmGmUmGmGmC | |
| | | | GUGCUUUU | mAmCmCmGmAm | |
| | | | | GmUmCmGmGmU | |
| | | | | mGmCmU*mU*mU | |
| | | | | *mU | |
| G018977 | 385 | CCCACAGAAG | CCCACAGAAG | mC*mC*mC*ACAG | chr6: 29945180- |
| | | AUGUGGCUA | AUGUGGCUA | AAGAUGUGGCUA | 29945200 |
| | | G | GGUUUUAGA | GGUUUUAGAmGm | |
| | | | GCUAGAAAU | CmUmAmGmAmA | |
| | | | AGCAAGUUA | mAmUmAmGmCA | |
| | | | AAAUAAGGC | AGUUAAAAUAAG | |
| | | | UAGUCCGUU | GCUAGUCCGUUA | |
| | | | AUCAACUUG | UCAmAmCmUmU | |
| | | | AAAAAGUGG | mGmAmAmAmAm | |
| | | | CACCGAGUCG | AmGmUmGmGmC | |
| | | | GUGCUUUU | mAmCmCmGmAm | |
| | | | | GmUmCmGmGmU | |
| | | | | mGmCmU*mU*mU | |
| | | | | *mU | |
| G018978 | 386 | GUCAGAUCCC | GUCAGAUCCC | mG*mU*mC*AGA | chr6: 29945187- |
| | | ACAGAAGAU | ACAGAAGAU | UCCCACAGAAGA | 29945207 |
| | | G | GGUUUUAGA | UGGUUUUAGAmG | |
| | | | GCUAGAAAU | mCmUmAmGmAm | |
| | | | AGCAAGUUA | AmAmUmAmGmC | |
| | | | AAAUAAGGC | AAGUUAAAAUAA | |
| | | | UAGUCCGUU | GGCUAGUCCGUU | |
| | | | AUCAACUUG | AUCAmAmCmUmU | |
| | | | AAAAAGUGG | mGmAmAmAmAm | |
| | | | CACCGAGUCG | AmGmUmGmGmC | |
| | | | GUGCUUUU | mAmCmCmGmAm | |
| | | | | GmUmCmGmGmU | |
| | | | | mGmCmU*mU*mU | |
| | | | | *mU | |
| G018979 | 387 | AUCUUCUGU | AUCUUCUGU | mA*mU*mC*UUCU | chr6: 29945188- |
| | | GGGAUCUGA | GGGAUCUGA | GUGGGAUCUGAC | 29945208 |
| | | CC | CCGUUUUAG | CGUUUUAGAmGm | |
| | | | AGCUAGAAA | CmUmAmGmAmA | |
| | | | UAGCAAGUU | mAmUmAmGmCA | |
| | | | AAAAUAAGG | AGUUAAAAUAAG | |
| | | | CUAGUCCGU | GCUAGUCCGUUA | |
| | | | UAUCAACUU | UCAmAmCmUmU | |
| | | | GAAAAAGUG | mGmAmAmAmAm | |
| | | | GCACCGAGUC | AmGmUmGmGmC | |
| | | | GGUGCUUUU | mAmCmCmGmAm | |
| | | | | GmUmCmGmGmU | |
| | | | | mGmCmU*mU*mU | |
| | | | | *mU | |
| G018980 | 388 | CCCAGGCAGU | CCCAGGCAGU | mC*mC*mC*AGGC | chr6: 29945228- |
| | | GACAGUGCCC | GACAGUGCCC | AGUGACAGUGCC | 29945248 |
| | | | GUUUUAGAG | CGUUUUAGAmGm | |
| | | | CUAGAAAUA | CmUmAmGmAmA | |
| | | | GCAAGUUAA | mAmUmAmGmCA | |
| | | | AAUAAGGCU | AGUUAAAAUAAG | |
| | | | AGUCCGUUA | GCUAGUCCGUUA | |
| | | | UCAACUUGA | UCAmAmCmUmU | |
| | | | AAAAGUGGC | mGmAmAmAmAm | |
| | | | ACCGAGUCG | AmGmUmGmGmC | |
| | | | GUGCUUUU | mAmCmCmGmAm | |
| | | | | GmUmCmGmGmU | |
| | | | | mGmCmU*mU*mU | |
| | | | | *mU | |
| G018981 | 389 | CUGGGCACU | CUGGGCACU | mC*mU*mG*GGCA | chr6: 29945230- |
| | | GUCACUGCCU | GUCACUGCCU | CUGUCACUGCCU | 29945250 |
| | | G | GGUUUUAGA | GGUUUUAGAmGm | |
| | | | GCUAGAAAU | CmUmAmGmAmA | |
| | | | AGCAAGUUA | mAmUmAmGmCA | |
| | | | AAAUAAGGC | AGUUAAAAUAAG | |
| | | | UAGUCCGUU | GCUAGUCCGUUA | |
| | | | AUCAACUUG | UCAmAmCmUmU | |
| | | | AAAAAGUGG | mGmAmAmAmAm | |
| | | | CACCGAGUCG | AmGmUmGmGmC | |
| | | | GUGCUUUU | mAmCmCmGmAm | |
| | | | | GmUmCmGmGmU | |
| | | | | mGmCmU*mU*mU | |
| | | | | *mU | |
| G018982 | 390 | CCUGGGCACU | CCUGGGCACU | mC*mC*mU*GGGC | chr6: 29945231- |
| | | GUCACUGCCU | GUCACUGCCU | ACUGUCACUGCC | 29945251 |
| | | | GUUUUAGAG | UGUUUUAGAmGm | |
| | | | CUAGAAAUA | CmUmAmGmAmA | |
| | | | GCAAGUUAA | mAmUmAmGmCA | |
| | | | AAUAAGGCU | AGUUAAAAUAAG | |
| | | | AGUCCGUUA | GCUAGUCCGUUA | |
| | | | UCAACUUGA | UCAmAmCmUmU | |
| | | | AAAAGUGGC | mGmAmAmAmAm | |
| | | | ACCGAGUCG | AmGmUmGmGmC | |
| | | | GUGCUUUU | mAmCmCmGmAm | |
| | | | | GmUmCmGmGmU | |
| | | | | mGmCmU*mU*mU | |
| | | | | *mU | |
| G021207 | 391 | CCCUGGGCAC | CCCUGGGCAC | mC*mC*mC*UGGG | chr6: 29945232- |
| | | UGUCACUGCC | UGUCACUGCC | CACUGUCACUGC | 29945252 |
| | | | GUUUUAGAG | CGUUUUAGAmGm | |
| | | | CUAGAAAUA | CmUmAmGmAmA | |
| | | | GCAAGUUAA | mAmUmAmGmCA | |
| | | | AAUAAGGCU | AGUUAAAAUAAG | |
| | | | AGUCCGUUA | GCUAGUCCGUUA | |
| | | | UCAACUUGA | UCAmAmCmUmU | |
| | | | AAAAGUGGC | mGmAmAmAmAm | |
| | | | ACCGAGUCG | AmGmUmGmGmC | |
| | | | GUGCUUUU | mAmCmCmGmAm | |
| | | | | GmUmCmGmGmU | |
| | | | | mGmCmU*mU*mU | |
| | | | | *mU | |
| G018987 | 392 | UUGGGUGUU | UUGGGUGUU | mU*mU*mG*GGU | chr6: 29945308- |
| | | GGGCGGAAC | GGGCGGAAC | GUUGGGCGGAAC | 29945328 |
| | | AG | AGGUUUUAG | AGGUUUUAGAmG | |
| | | | AGCUAGAAA | mCmUmAmGmAm | |
| | | | UAGCAAGUU | AmAmUmAmGmC | |
| | | | AAAAUAAGG | AAGUUAAAAUAA | |
| | | | CUAGUCCGU | GGCUAGUCCGUU | |
| | | | UAUCAACUU | AUCAmAmCmUmU | |
| | | | GAAAAAGUG | mGmAmAmAmAm | |
| | | | GCACCGAGUC | AmGmUmGmGmC | |
| | | | GGUGCUUUU | mAmCmCmGmAm | |
| | | | | GmUmCmGmGmU | |
| | | | | mGmCmU*mU*mU | |
| | | | | *mU | |
| G018988 | 393 | UGGAUGUAU | UGGAUGUAU | mU*mG*mG*AUG | chr6: 29945361- |
| | | UGAGCAUGC | UGAGCAUGC | UAUUGAGCAUGC | 29945381 |
| | | GA | GAGUUUUAG | GAGUUUUAGAmG | |
| | | | AGCUAGAAA | mCmUmAmGmAm | |
| | | | UAGCAAGUU | AmAmUmAmGmC | |
| | | | AAAAUAAGG | AAGUUAAAAUAA | |
| | | | CUAGUCCGU | GGCUAGUCCGUU | |
| | | | UAUCAACUU | AUCAmAmCmUmU | |
| | | | GAAAAAGUG | mGmAmAmAmAm | |
| | | | GCACCGAGUC | AmGmUmGmGmC | |
| | | | GGUGCUUUU | mAmCmCmGmAm | |
| | | | | GmUmCmGmGmU | |
| | | | | mGmCmU*mU*mU | |
| | | | | *mU | |
| G018989 | 394 | GGAUGUAUU | GGAUGUAUU | mG*mG*mA*UGU | chr6: 29945362- |
| | | GAGCAUGCG | GAGCAUGCG | AUUGAGCAUGCG | 29945382 |
| | | AU | AUGUUUUAG | AUGUUUUAGAmG | |
| | | | AGCUAGAAA | mCmUmAmGmAm | |
| | | | UAGCAAGUU | AmAmUmAmGmC | |
| | | | AAAAUAAGG | AAGUUAAAAUAA | |
| | | | CUAGUCCGU | GGCUAGUCCGUU | |
| | | | UAUCAACUU | AUCAmAmCmUmU | |
| | | | GAAAAAGUG | mGmAmAmAmAm | |
| | | | GCACCGAGUC | AmGmUmGmGmC | |
| | | | GGUGCUUUU | mAmCmCmGmAm | |
| | | | | GmUmCmGmGmU | |
| | | | | mGmCmU*mU*mU | |
| | | | | *mU | |
| G018963 | 395 | AACAUGAAG | AACAUGAAG | mA*mA*mC*AUG | chr6: 31382543- |
| | | AAAGCAGGU | AAAGCAGGU | AAGAAAGCAGGU | 31382563 |
| | | GU | GUGUUUUAG | GUGUUUUAGAmG | |
| | | | AGCUAGAAA | mCmUmAmGmAm | |
| | | | UAGCAAGUU | AmAmUmAmGmC | |
| | | | AAAAUAAGG | AAGUUAAAAUAA | |
| | | | CUAGUCCGU | GGCUAGUCCGUU | |
| | | | UAUCAACUU | AUCAmAmCmUmU | |
| | | | GAAAAAGUG | mGmAmAmAmAm | |
| | | | GCACCGAGUC | AmGmUmGmGmC | |
| | | | GGUGCUUUU | mAmCmCmGmAm | |
| | | | | GmUmCmGmGmU | |
| | | | | mGmCmU*mU*mU | |
| | | | | *mU | |
| G021885 | 396 | UAGCCCACGG | UAGCCCACGG | mU*mA*mG*CCCA | chr6: 29942815- |
| | | CGAUGAAGC | CGAUGAAGC | CGGCGAUGAAGC | 29942835 |
| | | G | GGUUUUAGA | GGUUUUAGAmGm | |
| | | | GCUAGAAAU | CmUmAmGmAmA | |
| | | | AGCAAGUUA | mAmUmAmGmCA | |
| | | | AAAUAAGGC | AGUUAAAAUAAG | |
| | | | UAGUCCGUU | GCUAGUCCGUUA | |
| | | | AUCAACUUG | UCAmAmCmUmU | |
| | | | AAAAAGUGG | mGmAmAmAmAm | |
| | | | CACCGAGUCG | AmGmUmGmGmC | |
| | | | GUGCUUUU | mAmCmCmGmAm | |
| | | | | GmUmCmGmGmU | |
| | | | | mGmCmU*mU*mU | |
| | | | | *mU | |
| G021886 | 397 | GUAGCCCACG | GUAGCCCACG | mG*mU*mA*GCCC | chr6: 29942816- |
| | | GCGAUGAAG | GCGAUGAAG | ACGGCGAUGAAG | 29942836 |
| | | C | CGUUUUAGA | CGUUUUAGAmGm | |
| | | | GCUAGAAAU | CmUmAmGmAmA | |
| | | | AGCAAGUUA | mAmUmAmGmCA | |
| | | | AAAUAAGGC | AGUUAAAAUAAG | |
| | | | UAGUCCGUU | GCUAGUCCGUUA | |
| | | | AUCAACUUG | UCAmAmCmUmU | |
| | | | AAAAAGUGG | mGmAmAmAmAm | |
| | | | CACCGAGUCG | AmGmUmGmGmC | |
| | | | GUGCUUUU | mAmCmCmGmAm | |
| | | | | GmUmCmGmGmU | |
| | | | | mGmCmU*mU*mU | |
| | | | | *mU | |
| G021887 | 398 | CGUAGCCCAC | CGUAGCCCAC | mC*mG*mU*AGCC | chr6: 29942817- |
| | | GGCGAUGAA | GGCGAUGAA | CACGGCGAUGAA | 29942837 |
| | | G | GGUUUUAGA | GGUUUUAGAmGm | |
| | | | GCUAGAAAU | CmUmAmGmAmA | |
| | | | AGCAAGUUA | mAmUmAmGmCA | |
| | | | AAAUAAGGC | AGUUAAAAUAAG | |
| | | | UAGUCCGUU | GCUAGUCCGUUA | |
| | | | AUCAACUUG | UCAmAmCmUmU | |
| | | | AAAAAGUGG | mGmAmAmAmAm | |
| | | | CACCGAGUCG | AmGmUmGmGmC | |
| | | | GUGCUUUU | mAmCmCmGmAm | |
| | | | | GmUmCmGmGmU | |
| | | | | mGmCmU*mU*mU | |
| | | | | *mU | |
| G021888 | 399 | CUUCAUCGCC | CUUCAUCGCC | mC*mU*mU*CAUC | chr6: 29942817- |
| | | GUGGGCUAC | GUGGGCUAC | GCCGUGGGCUAC | 29942837 |
| | | G | GGUUUUAGA | GGUUUUAGAmGm | |
| | | | GCUAGAAAU | CmUmAmGmAmA | |
| | | | AGCAAGUUA | mAmUmAmGmCA | |
| | | | AAAUAAGGC | AGUUAAAAUAAG | |
| | | | UAGUCCGUU | GCUAGUCCGUUA | |
| | | | AUCAACUUG | UCAmAmCmUmU | |
| | | | AAAAAGUGG | mGmAmAmAmAm | |
| | | | CACCGAGUCG | AmGmUmGmGmC | |
| | | | GUGCUUUU | mAmCmCmGmAm | |
| | | | | GmUmCmGmGmU | |
| | | | | mGmCmU*mU*mU | |
| | | | | *mU | |
| G021889 | 400 | CGUGUCGUCC | CGUGUCGUCC | mC*mG*mU*GUCG | chr6: 29942828- |
| | | ACGUAGCCCA | ACGUAGCCCA | UCCACGUAGCCC | 29942848 |
| | | | GUUUUAGAG | AGUUUUAGAmGm | |
| | | | CUAGAAAUA | CmUmAmGmAmA | |
| | | | GCAAGUUAA | mAmUmAmGmCA | |
| | | | AAUAAGGCU | AGUUAAAAUAAG | |
| | | | AGUCCGUUA | GCUAGUCCGUUA | |
| | | | UCAACUUGA | UCAmAmCmUmU | |
| | | | AAAAGUGGC | mGmAmAmAmAm | |
| | | | ACCGAGUCG | AmGmUmGmGmC | |
| | | | GUGCUUUU | mAmCmCmGmAm | |
| | | | | GmUmCmGmGmU | |
| | | | | mGmCmU*mU*mU | |
| | | | | *mU | |
| G021890 | 401 | UGGACGACA | UGGACGACA | mU*mG*mG*ACG | chr6: 29942837- |
| | | CGCAGUUCG | CGCAGUUCG | ACACGCAGUUCG | 29942857 |
| | | UG | UGGUUUUAG | UGGUUUUAGAmG | |
| | | | AGCUAGAAA | mCmUmAmGmAm | |
| | | | UAGCAAGUU | AmAmUmAmGmC | |
| | | | AAAAUAAGG | AAGUUAAAAUAA | |
| | | | CUAGUCCGU | GGCUAGUCCGUU | |
| | | | UAUCAACUU | AUCAmAmCmUmU | |
| | | | GAAAAAGUG | mGmAmAmAmAm | |
| | | | GCACCGAGUC | AmGmUmGmGmC | |
| | | | GGUGCUUUU | mAmCmCmGmAm | |
| | | | | GmUmCmGmGmU | |
| | | | | mGmCmU*mU*mU | |
| | | | | *mU | |
| G021891 | 402 | GGAUGGAGC | GGAUGGAGC | mG*mG*mA*UGG | chr6: 29942885- |
| | | CGCGGGCGCC | CGCGGGCGCC | AGCCGCGGGCGC | 29942905 |
| | | G | GGUUUUAGA | CGGUUUUAGAmG | |
| | | | GCUAGAAAU | mCmUmAmGmAm | |
| | | | AGCAAGUUA | AmAmUmAmGmC | |
| | | | AAAUAAGGC | AAGUUAAAAUAA | |
| | | | UAGUCCGUU | GGCUAGUCCGUU | |
| | | | AUCAACUUG | AUCAmAmCmUmU | |
| | | | AAAAAGUGG | mGmAmAmAmAm | |
| | | | CACCGAGUCG | AmGmUmGmGmC | |
| | | | GUGCUUUU | mAmCmCmGmAm | |
| | | | | GmUmCmGmGmU | |
| | | | | mGmCmU*mU*mU | |
| | | | | *mU | |
| G021892 | 403 | GCGGGCGCCG | GCGGGCGCCG | mG*mC*mG*GGCG | chr6: 29942895- |
| | | UGGAUAGAG | UGGAUAGAG | CCGUGGAUAGAG | 29942915 |
| | | C | CGUUUUAGA | CGUUUUAGAmGm | |
| | | | GCUAGAAAU | CmUmAmGmAmA | |
| | | | AGCAAGUUA | mAmUmAmGmCA | |
| | | | AAAUAAGGC | AGUUAAAAUAAG | |
| | | | UAGUCCGUU | GCUAGUCCGUUA | |
| | | | AUCAACUUG | UCAmAmCmUmU | |
| | | | AAAAAGUGG | mGmAmAmAmAm | |
| | | | CACCGAGUCG | AmGmUmGmGmC | |
| | | | GUGCUUUU | mAmCmCmGmAm | |
| | | | | GmUmCmGmGmU | |
| | | | | mGmCmU*mU*mU | |
| | | | | *mU | |
| G021893 | 404 | UGCUCUAUCC | UGCUCUAUCC | mU*mG*mC*UCUA | chr6: 29942896- |
| | | ACGGCGCCCG | ACGGCGCCCG | UCCACGGCGCCC | 29942916 |
| | | | GUUUUAGAG | GGUUUUAGAmGm | |
| | | | CUAGAAAUA | CmUmAmGmAmA | |
| | | | GCAAGUUAA | mAmUmAmGmCA | |
| | | | AAUAAGGCU | AGUUAAAAUAAG | |
| | | | AGUCCGUUA | GCUAGUCCGUUA | |
| | | | UCAACUUGA | UCAmAmCmUmU | |
| | | | AAAAGUGGC | mGmAmAmAmAm | |
| | | | ACCGAGUCG | AmGmUmGmGmC | |
| | | | GUGCUUUU | mAmCmCmGmAm | |
| | | | | GmUmCmGmGmU | |
| | | | | mGmCmU*mU*mU | |
| | | | | *mU | |
| G021894 | 405 | GGCGCCGUG | GGCGCCGUG | mG*mG*mC*GCCG | chr6: 29942898- |
| | | GAUAGAGCA | GAUAGAGCA | UGGAUAGAGCAG | 29942918 |
| | | GG | GGGUUUUAG | GGUUUUAGAmGm | |
| | | | AGCUAGAAA | CmUmAmGmAmA | |
| | | | UAGCAAGUU | mAmUmAmGmCA | |
| | | | AAAAUAAGG | AGUUAAAAUAAG | |
| | | | CUAGUCCGU | GCUAGUCCGUUA | |
| | | | UAUCAACUU | UCAmAmCmUmU | |
| | | | GAAAAAGUG | mGmAmAmAmAm | |
| | | | GCACCGAGUC | AmGmUmGmGmC | |
| | | | GGUGCUUUU | mAmCmCmGmAm | |
| | | | | GmUmCmGmGmU | |
| | | | | mGmCmU*mU*mU | |
| | | | | *mU | |
| G021895 | 406 | GCGCCGUGG | GCGCCGUGG | mG*mC*mG*CCGU | chr6: 29942899- |
| | | AUAGAGCAG | AUAGAGCAG | GGAUAGAGCAGG | 29942919 |
| | | GA | GAGUUUUAG | AGUUUUAGAmGm | |
| | | | AGCUAGAAA | CmUmAmGmAmA | |
| | | | UAGCAAGUU | mAmUmAmGmCA | |
| | | | AAAAUAAGG | AGUUAAAAUAAG | |
| | | | CUAGUCCGU | GCUAGUCCGUUA | |
| | | | UAUCAACUU | UCAmAmCmUmU | |
| | | | GAAAAAGUG | mGmAmAmAmAm | |
| | | | GCACCGAGUC | AmGmUmGmGmC | |
| | | | GGUGCUUUU | mAmCmCmGmAm | |
| | | | | GmUmCmGmGmU | |
| | | | | mGmCmU*mU*mU | |
| | | | | *mU | |
| G021896 | 407 | CGCCGUGGA | CGCCGUGGA | mC*mG*mC*CGUG | chr6: 29942900- |
| | | UAGAGCAGG | UAGAGCAGG | GAUAGAGCAGGA | 29942920 |
| | | AG | AGGUUUUAG | GGUUUUAGAmGm | |
| | | | AGCUAGAAA | CmUmAmGmAmA | |
| | | | UAGCAAGUU | mAmUmAmGmCA | |
| | | | AAAAUAAGG | AGUUAAAAUAAG | |
| | | | CUAGUCCGU | GCUAGUCCGUUA | |
| | | | UAUCAACUU | UCAmAmCmUmU | |
| | | | GAAAAAGUG | mGmAmAmAmAm | |
| | | | GCACCGAGUC | AmGmUmGmGmC | |
| | | | GGUGCUUUU | mAmCmCmGmAm | |
| | | | | GmUmCmGmGmU | |
| | | | | mGmCmU*mU*mU | |
| | | | | *mU | |
| G021897 | 408 | GUGGAUAGA | GUGGAUAGA | mG*mU*mG*GAU | chr6: 29942904- |
| | | GCAGGAGGG | GCAGGAGGG | AGAGCAGGAGGG | 29942924 |
| | | GC | GCGUUUUAG | GCGUUUUAGAmG | |
| | | | AGCUAGAAA | mCmUmAmGmAm | |
| | | | UAGCAAGUU | AmAmUmAmGmC | |
| | | | AAAAUAAGG | AAGUUAAAAUAA | |
| | | | CUAGUCCGU | GGCUAGUCCGUU | |
| | | | UAUCAACUU | AUCAmAmCmUmU | |
| | | | GAAAAAGUG | mGmAmAmAmAm | |
| | | | GCACCGAGUC | AmGmUmGmGmC | |
| | | | GGUGCUUUU | mAmCmCmGmAm | |
| | | | | GmUmCmGmGmU | |
| | | | | mGmCmU*mU*mU | |
| | | | | *mU | |
| G021898 | 409 | GGCCCCUCCU | GGCCCCUCCU | mG*mG*mC*CCCU | chr6: 29942905- |
| | | GCUCUAUCCA | GCUCUAUCCA | CCUGCUCUAUCC | 29942925 |
| | | | GUUUUAGAG | AGUUUUAGAmGm | |
| | | | CUAGAAAUA | CmUmAmGmAmA | |
| | | | GCAAGUUAA | mAmUmAmGmCA | |
| | | | AAUAAGGCU | AGUUAAAAUAAG | |
| | | | AGUCCGUUA | GCUAGUCCGUUA | |
| | | | UCAACUUGA | UCAmAmCmUmU | |
| | | | AAAAGUGGC | mGmAmAmAmAm | |
| | | | ACCGAGUCG | AmGmUmGmGmC | |
| | | | GUGCUUUU | mAmCmCmGmAm | |
| | | | | GmUmCmGmGmU | |
| | | | | mGmCmU*mU*mU | |
| | | | | *mU | |
| G021899 | 410 | AGCAGGAGG | AGCAGGAGG | mA*mG*mC*AGG | chr6: 29942912- |
| | | GGCCGGAGU | GGCCGGAGU | AGGGGCCGGAGU | 29942932 |
| | | AU | AUGUUUUAG | AUGUUUUAGAmG | |
| | | | AGCUAGAAA | mCmUmAmGmAm | |
| | | | UAGCAAGUU | AmAmUmAmGmC | |
| | | | AAAAUAAGG | AAGUUAAAAUAA | |
| | | | CUAGUCCGU | GGCUAGUCCGUU | |
| | | | UAUCAACUU | AUCAmAmCmUmU | |
| | | | GAAAAAGUG | mGmAmAmAmAm | |
| | | | GCACCGAGUC | AmGmUmGmGmC | |
| | | | GGUGCUUUU | mAmCmCmGmAm | |
| | | | | GmUmCmGmGmU | |
| | | | | mGmCmU*mU*mU | |
| | | | | *mU | |
| G021900 | 411 | GCAGGAGGG | GCAGGAGGG | mG*mC*mA*GGA | chr6: 29942913- |
| | | GCCGGAGUA | GCCGGAGUA | GGGGCCGGAGUA | 29942933 |
| | | UU | UUGUUUUAG | UUGUUUUAGAmG | |
| | | | AGCUAGAAA | mCmUmAmGmAm | |
| | | | UAGCAAGUU | AmAmUmAmGmC | |
| | | | AAAAUAAGG | AAGUUAAAAUAA | |
| | | | CUAGUCCGU | GGCUAGUCCGUU | |
| | | | UAUCAACUU | AUCAmAmCmUmU | |
| | | | GAAAAAGUG | mGmAmAmAmAm | |
| | | | GCACCGAGUC | AmGmUmGmGmC | |
| | | | GGUGCUUUU | mAmCmCmGmAm | |
| | | | | GmUmCmGmGmU | |
| | | | | mGmCmU*mU*mU | |
| | | | | *mU | |
| G021901 | 412 | GGAGUGGCU | GGAGUGGCU | mG*mG*mA*GUG | chr6: 29943490- |
| | | CCGCAGAUAC | CCGCAGAUAC | GCUCCGCAGAUA | 29943510 |
| | | C | CGUUUUAGA | CCGUUUUAGAmG | |
| | | | GCUAGAAAU | mCmUmAmGmAm | |
| | | | AGCAAGUUA | AmAmUmAmGmC | |
| | | | AAAUAAGGC | AAGUUAAAAUAA | |
| | | | UAGUCCGUU | GGCUAGUCCGUU | |
| | | | AUCAACUUG | AUCAmAmCmUmU | |
| | | | AAAAAGUGG | mGmAmAmAmAm | |
| | | | CACCGAGUCG | AmGmUmGmGmC | |
| | | | GUGCUUUU | mAmCmCmGmAm | |
| | | | | GmUmCmGmGmU | |
| | | | | mGmCmU*mU*mU | |
| | | | | *mU | |
| G021902 | 413 | CUCCGCAGAU | CUCCGCAGAU | mC*mU*mC*CGCA | chr6: 29943497- |
| | | ACCUGGAGA | ACCUGGAGA | GAUACCUGGAGA | 29943517 |
| | | A | AGUUUUAGA | AGUUUUAGAmGm | |
| | | | GCUAGAAAU | CmUmAmGmAmA | |
| | | | AGCAAGUUA | mAmUmAmGmCA | |
| | | | AAAUAAGGC | AGUUAAAAUAAG | |
| | | | UAGUCCGUU | GCUAGUCCGUUA | |
| | | | AUCAACUUG | UCAmAmCmUmU | |
| | | | AAAAAGUGG | mGmAmAmAmAm | |
| | | | CACCGAGUCG | AmGmUmGmGmC | |
| | | | GUGCUUUU | mAmCmCmGmAm | |
| | | | | GmUmCmGmGmU | |
| | | | | mGmCmU*mU*mU | |
| | | | | *mU | |
| G021903 | 414 | UCCGCAGAU | UCCGCAGAU | mU*mC*mC*GCAG | chr6: 29943498- |
| | | ACCUGGAGA | ACCUGGAGA | AUACCUGGAGAA | 29943518 |
| | | AC | ACGUUUUAG | CGUUUUAGAmGm | |
| | | | AGCUAGAAA | CmUmAmGmAmA | |
| | | | UAGCAAGUU | mAmUmAmGmCA | |
| | | | AAAAUAAGG | AGUUAAAAUAAG | |
| | | | CUAGUCCGU | GCUAGUCCGUUA | |
| | | | UAUCAACUU | UCAmAmCmUmU | |
| | | | GAAAAAGUG | mGmAmAmAmAm | |
| | | | GCACCGAGUC | AmGmUmGmGmC | |
| | | | GGUGCUUUU | mAmCmCmGmAm | |
| | | | | GmUmCmGmGmU | |
| | | | | mGmCmU*mU*mU | |
| | | | | *mU | |
| G021904 | 415 | CAGAUACCU | CAGAUACCU | mC*mA*mG*AUAC | chr6: 29943502- |
| | | GGAGAACGG | GGAGAACGG | CUGGAGAACGGG | 29943522 |
| | | GA | GAGUUUUAG | AGUUUUAGAmGm | |
| | | | AGCUAGAAA | CmUmAmGmAmA | |
| | | | UAGCAAGUU | mAmUmAmGmCA | |
| | | | AAAAUAAGG | AGUUAAAAUAAG | |
| | | | CUAGUCCGU | GCUAGUCCGUUA | |
| | | | UAUCAACUU | UCAmAmCmUmU | |
| | | | GAAAAAGUG | mGmAmAmAmAm | |
| | | | GCACCGAGUC | AmGmUmGmGmC | |
| | | | GGUGCUUUU | mAmCmCmGmAm | |
| | | | | GmUmCmGmGmU | |
| | | | | mGmCmU*mU*mU | |
| | | | | *mU | |
| G021905 | 416 | UCCCGUUCUC | UCCCGUUCUC | mU*mC*mC*CGUU | chr6: 29943502- |
| | | CAGGUAUCU | CAGGUAUCU | CUCCAGGUAUCU | 29943522 |
| | | G | GGUUUUAGA | GGUUUUAGAmGm | |
| | | | GCUAGAAAU | CmUmAmGmAmA | |
| | | | AGCAAGUUA | mAmUmAmGmCA | |
| | | | AAAUAAGGC | AGUUAAAAUAAG | |
| | | | UAGUCCGUU | GCUAGUCCGUUA | |
| | | | AUCAACUUG | UCAmAmCmUmU | |
| | | | AAAAAGUGG | mGmAmAmAmAm | |
| | | | CACCGAGUCG | AmGmUmGmGmC | |
| | | | GUGCUUUU | mAmCmCmGmAm | |
| | | | | GmUmCmGmGmU | |
| | | | | mGmCmU*mU*mU | |
| | | | | *mU | |
| G021906 | 417 | GCGUCUCCUU | GCGUCUCCUU | mG*mC*mG*UCUC | chr6: 29943511- |
| | | CCCGUUCUCC | CCCGUUCUCC | CUUCCCGUUCUC | 29943531 |
| | | | GUUUUAGAG | CGUUUUAGAmGm | |
| | | | CUAGAAAUA | CmUmAmGmAmA | |
| | | | GCAAGUUAA | mAmUmAmGmCA | |
| | | | AAUAAGGCU | AGUUAAAAUAAG | |
| | | | AGUCCGUUA | GCUAGUCCGUUA | |
| | | | UCAACUUGA | UCAmAmCmUmU | |
| | | | AAAAGUGGC | mGmAmAmAmAm | |
| | | | ACCGAGUCG | AmGmUmGmGmC | |
| | | | GUGCUUUU | mAmCmCmGmAm | |
| | | | | GmUmCmGmGmU | |
| | | | | mGmCmU*mU*mU | |
| | | | | *mU | |
| G021907 | 418 | GAAGGAGAC | GAAGGAGAC | mG*mA*mA*GGA | chr6: 29943520- |
| | | GCUGCAGCGC | GCUGCAGCGC | GACGCUGCAGCG | 29943540 |
| | | A | AGUUUUAGA | CAGUUUUAGAmG | |
| | | | GCUAGAAAU | mCmUmAmGmAm | |
| | | | AGCAAGUUA | AmAmUmAmGmC | |
| | | | AAAUAAGGC | AAGUUAAAAUAA | |
| | | | UAGUCCGUU | GGCUAGUCCGUU | |
| | | | AUCAACUUG | AUCAmAmCmUmU | |
| | | | AAAAAGUGG | mGmAmAmAmAm | |
| | | | CACCGAGUCG | AmGmUmGmGmC | |
| | | | GUGCUUUU | mAmCmCmGmAm | |
| | | | | GmUmCmGmGmU | |
| | | | | mGmCmU*mU*mU | |
| | | | | *mU | |
| G021908 | 419 | AAGGAGACG | AAGGAGACG | mA*mA*mG*GAG | chr6: 29943521- |
| | | CUGCAGCGCA | CUGCAGCGCA | ACGCUGCAGCGC | 29943541 |
| | | C | CGUUUUAGA | ACGUUUUAGAmG | |
| | | | GCUAGAAAU | mCmUmAmGmAm | |
| | | | AGCAAGUUA | AmAmUmAmGmC | |
| | | | AAAUAAGGC | AAGUUAAAAUAA | |
| | | | UAGUCCGUU | GGCUAGUCCGUU | |
| | | | AUCAACUUG | AUCAmAmCmUmU | |
| | | | AAAAAGUGG | mGmAmAmAmAm | |
| | | | CACCGAGUCG | AmGmUmGmGmC | |
| | | | GUGCUUUU | mAmCmCmGmAm | |
| | | | | GmUmCmGmGmU | |
| | | | | mGmCmU*mU*mU | |
| | | | | *mU | |
| G021909 | 420 | AGAUCUACA | AGAUCUACA | mA*mG*mA*UCU | chr6: 29943566- |
| | | GGCGAUCAG | GGCGAUCAG | ACAGGCGAUCAG | 29943586 |
| | | GG | GGGUUUUAG | GGGUUUUAGAmG | |
| | | | AGCUAGAAA | mCmUmAmGmAm | |
| | | | UAGCAAGUU | AmAmUmAmGmC | |
| | | | AAAAUAAGG | AAGUUAAAAUAA | |
| | | | CUAGUCCGU | GGCUAGUCCGUU | |
| | | | UAUCAACUU | AUCAmAmCmUmU | |
| | | | GAAAAAGUG | mGmAmAmAmAm | |
| | | | GCACCGAGUC | AmGmUmGmGmC | |
| | | | GGUGCUUUU | mAmCmCmGmAm | |
| | | | | GmUmCmGmGmU | |
| | | | | mGmCmU*mU*mU | |
| | | | | *mU | |
| G021910 | 421 | UGAUCGCCU | UGAUCGCCU | mU*mG*mA*UCGC | chr6: 29943569- |
| | | GUAGAUCUC | GUAGAUCUC | CUGUAGAUCUCC | 29943589 |
| | | CC | CCGUUUUAG | CGUUUUAGAmGm | |
| | | | AGCUAGAAA | CmUmAmGmAmA | |
| | | | UAGCAAGUU | mAmUmAmGmCA | |
| | | | AAAAUAAGG | AGUUAAAAUAAG | |
| | | | CUAGUCCGU | GCUAGUCCGUUA | |
| | | | UAUCAACUU | UCAmAmCmUmU | |
| | | | GAAAAAGUG | mGmAmAmAmAm | |
| | | | GCACCGAGUC | AmGmUmGmGmC | |
| | | | GGUGCUUUU | mAmCmCmGmAm | |
| | | | | GmUmCmGmGmU | |
| | | | | mGmCmU*mU*mU | |
| | | | | *mU | |
| G021911 | 422 | GGGAGAUCU | GGGAGAUCU | mG*mG*mG*AGA | chr6: 29943569- |
| | | ACAGGCGAU | ACAGGCGAU | UCUACAGGCGAU | 29943589 |
| | | CA | CAGUUUUAG | CAGUUUUAGAmG | |
| | | | AGCUAGAAA | mCmUmAmGmAm | |
| | | | UAGCAAGUU | AmAmUmAmGmC | |
| | | | AAAAUAAGG | AAGUUAAAAUAA | |
| | | | CUAGUCCGU | GGCUAGUCCGUU | |
| | | | UAUCAACUU | AUCAmAmCmUmU | |
| | | | GAAAAAGUG | mGmAmAmAmAm | |
| | | | GCACCGAGUC | AmGmUmGmGmC | |
| | | | GGUGCUUUU | mAmCmCmGmAm | |
| | | | | GmUmCmGmGmU | |
| | | | | mGmCmU*mU*mU | |
| | | | | *mU | |
| G021912 | 423 | CGGGAGAUC | CGGGAGAUC | mC*mG*mG*GAG | chr6: 29943570- |
| | | UACAGGCGA | UACAGGCGA | AUCUACAGGCGA | 29943590 |
| | | UC | UCGUUUUAG | UCGUUUUAGAmG | |
| | | | AGCUAGAAA | mCmUmAmGmAm | |
| | | | UAGCAAGUU | AmAmUmAmGmC | |
| | | | AAAAUAAGG | AAGUUAAAAUAA | |
| | | | CUAGUCCGU | GGCUAGUCCGUU | |
| | | | UAUCAACUU | AUCAmAmCmUmU | |
| | | | GAAAAAGUG | mGmAmAmAmAm | |
| | | | GCACCGAGUC | AmGmUmGmGmC | |
| | | | GGUGCUUUU | mAmCmCmGmAm | |
| | | | | GmUmCmGmGmU | |
| | | | | mGmCmU*mU*mU | |
| | | | | *mU | |
| G021913 | 424 | CGCCUGUAG | CGCCUGUAG | mC*mG*mC*CUGU | chr6: 29943573- |
| | | AUCUCCCGGG | AUCUCCCGGG | AGAUCUCCCGGG | 29943593 |
| | | C | CGUUUUAGA | CGUUUUAGAmGm | |
| | | | GCUAGAAAU | CmUmAmGmAmA | |
| | | | AGCAAGUUA | mAmUmAmGmCA | |
| | | | AAAUAAGGC | AGUUAAAAUAAG | |
| | | | UAGUCCGUU | GCUAGUCCGUUA | |
| | | | AUCAACUUG | UCAmAmCmUmU | |
| | | | AAAAAGUGG | mGmAmAmAmAm | |
| | | | CACCGAGUCG | AmGmUmGmGmC | |
| | | | GUGCUUUU | mAmCmCmGmAm | |
| | | | | GmUmCmGmGmU | |
| | | | | mGmCmU*mU*mU | |
| | | | | *mU | |
| G021914 | 425 | GGCCAGCCCG | GGCCAGCCCG | mG*mG*mC*CAGC | chr6: 29943578- |
| | | GGAGAUCUA | GGAGAUCUA | CCGGGAGAUCUA | 29943598 |
| | | C | CGUUUUAGA | CGUUUUAGAmGm | |
| | | | GCUAGAAAU | CmUmAmGmAmA | |
| | | | AGCAAGUUA | mAmUmAmGmCA | |
| | | | AAAUAAGGC | AGUUAAAAUAAG | |
| | | | UAGUCCGUU | GCUAGUCCGUUA | |
| | | | AUCAACUUG | UCAmAmCmUmU | |
| | | | AAAAAGUGG | mGmAmAmAmAm | |
| | | | CACCGAGUCG | AmGmUmGmGmC | |
| | | | GUGCUUUU | mAmCmCmGmAm | |
| | | | | GmUmCmGmGmU | |
| | | | | mGmCmU*mU*mU | |
| | | | | *mU | |
| G021915 | 426 | UCCCGGGCUG | UCCCGGGCUG | mU*mC*mC*CGGG | chr6: 29943585- |
| | | GCCUCCCACA | GCCUCCCACA | CUGGCCUCCCAC | 29943605 |
| | | | GUUUUAGAG | AGUUUUAGAmGm | |
| | | | CUAGAAAUA | CmUmAmGmAmA | |
| | | | GCAAGUUAA | mAmUmAmGmCA | |
| | | | AAUAAGGCU | AGUUAAAAUAAG | |
| | | | AGUCCGUUA | GCUAGUCCGUUA | |
| | | | UCAACUUGA | UCAmAmCmUmU | |
| | | | AAAAGUGGC | mGmAmAmAmAm | |
| | | | ACCGAGUCG | AmGmUmGmGmC | |
| | | | GUGCUUUU | mAmCmCmGmAm | |
| | | | | GmUmCmGmGmU | |
| | | | | mGmCmU*mU*mU | |
| | | | | *mU | |
| G021916 | 427 | GGGCUGGCC | GGGCUGGCC | mG*mG*mG*CUG | chr6: 29943589- |
| | | UCCCACAAGG | UCCCACAAGG | GCCUCCCACAAG | 29943609 |
| | | A | AGUUUUAGA | GAGUUUUAGAmG | |
| | | | GCUAGAAAU | mCmUmAmGmAm | |
| | | | AGCAAGUUA | AmAmUmAmGmC | |
| | | | AAAUAAGGC | AAGUUAAAAUAA | |
| | | | UAGUCCGUU | GGCUAGUCCGUU | |
| | | | AUCAACUUG | AUCAmAmCmUmU | |
| | | | AAAAAGUGG | mGmAmAmAmAm | |
| | | | CACCGAGUCG | AmGmUmGmGmC | |
| | | | GUGCUUUU | mAmCmCmGmAm | |
| | | | | GmUmCmGmGmU | |
| | | | | mGmCmU*mU*mU | |
| | | | | *mU | |
| G021917 | 428 | CUGAUCGCCU | CUGAUCGCCU | mC*mU*mG*AUCG | chr6: 29943568- |
| | | GUAGAUCUC | GUAGAUCUC | CCUGUAGAUCUC | 29943588 |
| | | C | CGUUUUAGA | CGUUUUAGAmGm | |
| | | | GCUAGAAAU | CmUmAmGmAmA | |
| | | | AGCAAGUUA | mAmUmAmGmCA | |
| | | | AAAUAAGGC | AGUUAAAAUAAG | |
| | | | UAGUCCGUU | GCUAGUCCGUUA | |
| | | | AUCAACUUG | UCAmAmCmUmU | |
| | | | AAAAAGUGG | mGmAmAmAmAm | |
| | | | CACCGAGUCG | AmGmUmGmGmC | |
| | | | GUGCUUUU | mAmCmCmGmAm | |
| | | | | GmUmCmGmGmU | |
| | | | | mGmCmU*mU*mU | |
| | | | | *mU | |

*The guide sequence disclosed in this Table may be unmodified, modified with the exemplary modification
pattern shown in the Table, or modified with a different modification pattern disclosed herein or
available in the art.

TABLE 5A
Additional exemplary HLA-A guide sequences

| SEQ ID | | | RNA-guided DNA | Genomic |
|---|---|---|---|---|
| NO | Guide Sequence | PAM | binding agent | Coordinates (hg38) |
| 429 | AGGAUGGAGCCGCGGGCGCC | GTGGA | S. aureus Cas9 | chr6: 29942884- |
| | | T | | 29942904 |
| 430 | GGAAGGAGACGCUGCAGCGC | ACGGG | S. aureus Cas9 | chr6: 29943519- |
| | | T | | 29943539 |
| 431 | GACAGCGACGCCGCGAGCCA | GAGGA | S. aureus Cas9 | chr6: 29942863- |
| | | T | | 29942883 |
| 432 | CGGGAAGGAGACGCUGCAGC | TTCT | CasX | chr6: 29943517- |
| | | | | 29943537 |
| 433 | CCGUGCGCUGCAGCGUCUCC | TTCC | CasX | chr6: 29943523- |
| | | | | 29943543 |
| 434 | ACGCAGUUCGUGCGGUUCGA | NNNNC | NME2 | chr6: 29942845- |
| | CAGC | C | | 29942869 |
| 435 | UCGUGCGGUUCGACAGCGAC | NNNNC | NME2 | chr6: 29942852- |
| | GCCG | C | | 29942876 |
| 436 | CAGCGACGCCGCGAGCCAGA | NNNNC | NME2 | chr6: 29942865- |
| | GGAU | C | | 29942889 |
| 437 | GCUCUAUCCACGGCGCCCGC | NNNNC | NME2 | chr6: 29942891- |
| | GGCU | C | | 29942915 |
| 438 | UCCUGCUCUAUCCACGGCGC | NNNNC | NME2 | chr6: 29942895- |
| | CCGC | C | | 29942919 |
| 439 | CCGGCCCCUCCUGCUCUAUC | NNNNC | NME2 | chr6: 29942903- |
| | CACG | C | | 29942927 |
| 440 | UCCGGCCCCUCCUGCUCUAU | NNNNC | NME2 | chr6: 29942904- |
| | CCAC | C | | 29942928 |
| 441 | GGGAAGGAGACGCUGCAGCG | NNNNC | NME2 | chr6: 29943518- |
| | CACG | C | | 29943542 |
| 442 | AGACGCUGCAGCGCACGGGU | NNNNC | NME2 | chr6: 29943525- |
| | ACCA | C | | 29943549 |
| 443 | GCGCACGGGUACCAGGGGCC | NNNNC | NME2 | chr6: 29943535- |
| | ACGG | C | | 29943559 |
| 444 | CACGGGUACCAGGGGCCACG | NNNNC | NME2 | chr6: 29943538- |
| | GGGC | C | | 29943562 |
| 445 | ACGGGUACCAGGGGCCACGG | NNNNC | NME2 | chr6: 29943539- |
| | GGCG | C | | 29943563 |
| 446 | CAGGGGCCACGGGGCGCCUC | NNNNC | NME2 | chr6: 29943547- |
| | CCUG | C | | 29943571 |
| 447 | CAGGGAGGCGCCCCGUGGCC | NNNNC | NME2 | chr6: 29943547- |
| | CCUG | C | | 29943571 |
| 448 | UCAGGGAGGCGCCCCGUGGC | NNNNC | NME2 | chr6: 29943548- |
| | CCCU | C | | 29943572 |
| 449 | CAGGCGAUCAGGGAGGCGCC | NNNNC | NME2 | chr6: 29943555- |
| | CCGU | C | | 29943579 |
| 450 | ACAGGCGAUCAGGGAGGCGC | NNNNC | NME2 | chr6: 29943556- |
| | CCCG | C | | 29943580 |
| 451 | UACAGGCGAUCAGGGAGGCG | NNNNC | NME2 | chr6: 29943557- |
| | CCCC | C | | 29943581 |
| 452 | GGGCGCCUCCCUGAUCGCCU | NNNNC | NME2 | chr6: 29943558- |
| | GUAG | C | | 29943582 |
| 453 | GGCGCCUCCCUGAUCGCCUG | NNNNC | NME2 | chr6: 29943559- |
| | UAGA | C | | 29943583 |
| 454 | GAGAUCUACAGGCGAUCAGG | NNNNC | NME2 | chr6: 29943563- |
| | GAGG | C | | 29943587 |
| 455 | GGAGAUCUACAGGCGAUCAG | NNNNC | NME2 | chr6: 29943564- |
| | GGAG | C | | 29943588 |
| 456 | GGGAGAUCUACAGGCGAUCA | NNNNC | NME2 | chr6: 29943565- |
| | GGGA | C | | 29943589 |
| 457 | CUGAUCGCCUGUAGAUCUCC | NNNNC | NME2 | chr6: 29943568- |
| | CGGG | C | | 29943592 |
| 458 | AUCGCCUGUAGAUCUCCCGG | NNNNC | NME2 | chr6: 29943571- |
| | GCUG | C | | 29943595 |
| 459 | UCGCCUGUAGAUCUCCCGGG | NNNNC | NME2 | chr6: 29943572- |
| | CUGG | C | | 29943596 |
| 460 | UUGUCUCCCCUCCUUGUGGG | NNNNC | NME2 | chr6: 29943595- |
| | AGGC | C | | 29943619 |
| 461 | AUUGUCUCCCCUCCUUGUGG | NNNNC | NME2 | chr6: 29943596- |
| | GAGG | C | | 29943620 |
| 462 | CCCAAUUGUCUCCCCUCCUU | NNNNC | NME2 | chr6: 29943600- |
| | GUGG | C | | 29943624 |

TABLE 5B
Exemplary Spy HLA-A guide sequences

| | | | | |
|---|---|---|---|---|
| 463 | GGAUGGAGCCGCGGGCGCCG | NGG | Spy + | chr6: |
| | | | Base_ | 29942885- |
| | | | Editor | 29942905 |
| 464 | GCGGGCGCCGUGGAUAGAGC | NGG | Spy + | chr6: |
| | | | Base_ | 29942895- |
| | | | Editor | 29942915 |
| 465 | UGCUCUAUCCACGGCGCCCG | NGG | Spy + | chr6: |
| | | | Base_ | 29942896- |
| | | | Editor | 29942916 |
| 466 | GGCGCCGUGGAUAGAGCAGG | NGG | Spy + | chr6: |
| | | | Base_ | 29942898- |
| | | | Editor | 29942918 |
| 467 | GCGCCGUGGAUAGAGCAGGA | NGG | Spy + | chr6: |
| | | | Base_ | 29942899- |
| | | | Editor | 29942919 |
| 468 | CGCCGUGGAUAGAGCAGGAG | NGG | Spy + | chr6: |
| | | | Base_ | 29942900- |
| | | | Editor | 29942920 |
| 469 | GUGGAUAGAGCAGGAGGGGC | NGG | Spy + | chr6: |
| | | | Base_ | 29942904- |
| | | | Editor | 29942924 |
| 470 | GCGUCUCCUUCCCGUUCUCC | NGG | Spy + | chr6: |
| | | | Base_ | 29943511- |
| | | | Editor | 29943531 |
| 471 | GAAGGAGACGCUGCAGCGCA | NGG | Spy + | chr6: |
| | | | Base_ | 29943520- |
| | | | Editor | 29943540 |
| 472 | AAGGAGACGCUGCAGCGCAC | NGG | Spy + | chr6: |
| | | | Base_ | 29943521- |
| | | | Editor | 29943541 |
| 473 | GCUGCAGCGCACGGGUACCA | NGG | Spy + | chr6: |
| | | | Base_ | 29943529- |
| | | | Editor | 29943549 |
| 474 | AGAUCUACAGGCGAUCAGGG | NGG | Spy + | chr6: |
| | | | Base_ | 29943566- |
| | | | Editor | 29943586 |
| 475 | CUGAUCGCCUGUAGAUCUCC | NGG | Spy + | chr6: |
| | | | Base_ | 29943568- |
| | | | Editor | 29943588 |
| 476 | UGAUCGCCUGUAGAUCUCCC | NGG | Spy + | chr6: |
| | | | Base_ | 29943569- |
| | | | Editor | 29943589 |
| 477 | GGGAGAUCUACAGGCGAUCA | NGG | Spy + | chr6: |
| | | | Base_ | 29943569- |
| | | | Editor | 29943589 |
| 478 | CGGGAGAUCUACAGGCGAUC | NGG | Spy + | chr6: |
| | | | Base_ | 29943570- |
| | | | Editor | 29943590 |
| 479 | CGCCUGUAGAUCUCCCGGGC | NGG | Spy + | chr6: |
| | | | Base_ | 29943573- |
| | | | Editor | 29943593 |
| 480 | GGCCAGCCCGGGAGAUCUAC | NGG | Spy + | chr6: |
| | | | Base_ | 29943578- |
| | | | Editor | 29943598 |
| 481 | UCCCGGGCUGGCCUCCCACA | NGG | Spy + | chr6: |
| | | | Base_ | 29943585- |
| | | | Editor | 29943605 |
| 482 | GGGCUGGCCUCCCACAAGGA | NGG | Spy + | chr6: |
| | | | Base_ | 29943589- |
| | | | Editor | 29943609 |

[000632] Table 6. Additional Exemplary HLA-A guide sequences.

| | | | | Exemplary Guide RNA | |
|---|---|---|---|---|---|
| | | | Exemplary | Modified Sequence | |
| | | | Guide RNA Full | (four terminal U | |
| | | | Sequence | residues are optional | |
| | SEQ ID NO | | with PAM | and may include 0, | |
| | to the | | (SEQ ID NOs: | 1, 2, 3, 4, or more Us) | Genomic |
| Guide | Guide | Guide | 1483-1498 and | (SEQ ID NOs: 2483-2498 | Coordinates |
| ID | Sequence | Sequence | 1500-1511) | and 2500-2511) | (hg38) |
| G021857 | 483 | ACGACAC | ACGACACUGAUU | mA*mC*mG*ACACUGAU | chr6: 29942469- |
| | | UGAUUGG | GGCUUCUCGUUU | UGGCUUCUCGUUUUAG | 29942489 |
| | | CUUCUC | UAGAGCUAGAAA | AmGmCmUmAmGmAmAm | |
| | | | UAGCAAGUUAAA | AmUmAmGmCAAGUUAA | |
| | | | AUAAGGCUAGUC | AAUAAGGCUAGUCCGU | |
| | | | CGUUAUCAACUU | UAUCAmAmCmUmUmGm | |
| | | | GAAAAAGUGGCA | AmAmAmAmAmGmUmG | |
| | | | CCGAGUCGGUGC | mGmCmAmCmCmGmAmG | |
| | | | UUUU | mUmCmGmGmUmGmCmU | |
| | | | | *mU*mU*mU | |
| G021858 | 484 | ACCCCUC | ACCCCUCAUCCC | mA*mC*mC*CCUCAUCC | chr6: 29943058- |
| | | AUCCCCC | CCACGGACGUUU | CCCACGGACGUUUUAG | 29943078 |
| | | ACGGAC | UAGAGCUAGAAA | AmGmCmUmAmGmAmAm | |
| | | | UAGCAAGUUAAA | AmUmAmGmCAAGUUAA | |
| | | | AUAAGGCUAGUC | AAUAAGGCUAGUCCGU | |
| | | | CGUUAUCAACUU | UAUCAmAmCmUmUmGm | |
| | | | GAAAAAGUGGCA | AmAmAmAmAmGmUmG | |
| | | | CCGAGUCGGUGC | mGmCmAmCmCmGmAmG | |
| | | | UUUU | mUmCmGmGmUmGmCmU | |
| | | | | *mU*mU*mU | |
| G021859 | 485 | GGCCCGU | GGCCCGUCCGUG | mG*mG*mC*CCGUCCGU | chr6: 29943063- |
| | | CCGUGGG | GGGGAUGAGUUU | GGGGGAUGAGUUUUAG | 29943083 |
| | | GGAUGA | UAGAGCUAGAAA | AmGmCmUmAmGmAmAm | |
| | | | UAGCAAGUUAAA | AmUmAmGmCAAGUUAA | |
| | | | AUAAGGCUAGUC | AAUAAGGCUAGUCCGU | |
| | | | CGUUAUCAACUU | UAUCAmAmCmUmUmGm | |
| | | | GAAAAAGUGGCA | AmAmAmAmAmGmUmG | |
| | | | CCGAGUCGGUGC | mGmCmAmCmCmGmAmG | |
| | | | UUUU | mUmCmGmGmUmGmCmU | |
| | | | | *mU*mU*mU | |
| G021860 | 486 | GCCAGGU | GCCAGGUCGCCC | mG*mC*mC*AGGUCGCC | chr6: 29943080- |
| | | CGCCCAC | ACAGUCUCGUUU | CACAGUCUCGUUUUAG | 29943100 |
| | | AGUCUC | UAGAGCUAGAAA | AmGmCmUmAmGmAmAm | |
| | | | UAGCAAGUUAAA | AmUmAmGmCAAGUUAA | |
| | | | AUAAGGCUAGUC | AAUAAGGCUAGUCCGU | |
| | | | CGUUAUCAACUU | UAUCAmAmCmUmUmGm | |
| | | | GAAAAAGUGGCA | AmAmAmAmAmGmUmG | |
| | | | CCGAGUCGGUGC | mGmCmAmCmCmGmAmG | |
| | | | UUUU | mUmCmGmGmUmGmCmU | |
| | | | | *mU*mU*mU | |
| G021861 | 487 | GUUUAGG | GUUUAGGCCAAA | mG*mU*mU*UAGGCCAA | chr6: 29943187- |
| | | CCAAAAA | AAUCCCCCGUUU | AAAUCCCCCGUUUUAG | 29943207 |
| | | UCCCCC | UAGAGCUAGAAA | AmGmCmUmAmGmAmAm | |
| | | | UAGCAAGUUAAA | AmUmAmGmCAAGUUAA | |
| | | | AUAAGGCUAGUC | AAUAAGGCUAGUCCGU | |
| | | | CGUUAUCAACUU | UAUCAmAmCmUmUmGm | |
| | | | GAAAAAGUGGCA | AmAmAmAmAmGmUmG | |
| | | | CCGAGUCGGUGC | mGmCmAmCmCmGmAmG | |
| | | | UUUU | mUmCmGmGmUmGmCmU | |
| | | | | *mU*mU*mU | |
| G021862 | 488 | GGCCAAA | GGCCAAAAAUCC | mG*mG*mC*CAAAAAUC | chr6: 29943192- |
| | | AAUCCCC | CCCCGGGUGUUU | CCCCCGGGUGUUUUAG | 29943212 |
| | | CCGGGU | UAGAGCUAGAAA | AmGmCmUmAmGmAmAm | |
| | | | UAGCAAGUUAAA | AmUmAmGmCAAGUUAA | |
| | | | AUAAGGCUAGUC | AAUAAGGCUAGUCCGU | |
| | | | CGUUAUCAACUU | UAUCAmAmCmUmUmGm | |
| | | | GAAAAAGUGGCA | AmAmAmAmAmGmUmG | |
| | | | CCGAGUCGGUGC | mGmCmAmCmCmGmAmG | |
| | | | UUUU | mUmCmGmGmUmGmCmU | |
| | | | | *mU*mU*mU | |
| G021863 | 489 | GACCAAC | GACCAACCCGGG | mG*mA*mC*CAACCCGG | chr6: 29943197- |
| | | CCGGGGG | GGGAUUUUGUUU | GGGGAUUUUGUUUUAG | 29943217 |
| | | GAUUUU | UAGAGCUAGAAA | AmGmCmUmAmGmAmAm | |
| | | | UAGCAAGUUAAA | AmUmAmGmCAAGUUAA | |
| | | | AUAAGGCUAGUC | AAUAAGGCUAGUCCGU | |
| | | | CGUUAUCAACUU | UAUCAmAmCmUmUmGm | |
| | | | GAAAAAGUGGCA | AmAmAmAmAmGmUmG | |
| | | | CCGAGUCGGUGC | mGmCmAmCmCmGmAmG | |
| | | | UUUU | mUmCmGmGmUmGmCmU | |
| | | | | *mU*mU*mU | |
| G021864 | 490 | CACGGGC | CACGGGCCCAAG | mC*mA*mC*GGGCCCAA | chr6: 29943812- |
| | | CCAAGGC | GCUGCUGCGUUU | GGCUGCUGCGUUUUAG | 29943832 |
| | | UGCUGC | UAGAGCUAGAAA | AmGmCmUmAmGmAmAm | |
| | | | UAGCAAGUUAAA | AmUmAmGmCAAGUUAA | |
| | | | AUAAGGCUAGUC | AAUAAGGCUAGUCCGU | |
| | | | CGUUAUCAACUU | UAUCAmAmCmUmUmGm | |
| | | | GAAAAAGUGGCA | AmAmAmAmAmGmUmG | |
| | | | CCGAGUCGGUGC | mGmCmAmCmCmGmAmG | |
| | | | UUUU | mUmCmGmGmUmGmCmU | |
| | | | | *mU*mU*mU | |
| G021865 | 491 | ACCCUCA | ACCCUCAUGCUG | mA*mC*mC*CUCAUGCU | chr6: 29944349- |
| | | UGCUGCA | CACAUGGCGUUU | GCACAUGGCGUUUUAG | 29944369 |
| | | CAUGGC | UAGAGCUAGAAA | AmGmCmUmAmGmAmAm | |
| | | | UAGCAAGUUAAA | AmUmAmGmCAAGUUAA | |
| | | | AUAAGGCUAGUC | AAUAAGGCUAGUCCGU | |
| | | | CGUUAUCAACUU | UAUCAmAmCmUmUmGm | |
| | | | GAAAAAGUGGCA | AmAmAmAmAmGmUmG | |
| | | | CCGAGUCGGUGC | mGmCmAmCmCmGmAmG | |
| | | | UUUU | mUmCmGmGmUmGmCmU | |
| | | | | *mU*mU*mU | |
| G021866 | 492 | CCUCUAG | CCUCUAGGACCU | mC*mC*mU*CUAGGACC | chr6: 29944996- |
| | | GACCUUA | UAAGGCCCGUUU | UUAAGGCCCGUUUUAG | 29945016 |
| | | AGGCCC | UAGAGCUAGAAA | AmGmCmUmAmGmAmAm | |
| | | | UAGCAAGUUAAA | AmUmAmGmCAAGUUAA | |
| | | | AUAAGGCUAGUC | AAUAAGGCUAGUCCGU | |
| | | | CGUUAUCAACUU | UAUCAmAmCmUmUmGm | |
| | | | GAAAAAGUGGCA | AmAmAmAmAmGmUmG | |
| | | | CCGAGUCGGUGC | mGmCmAmCmCmGmAmG | |
| | | | UUUU | mUmCmGmGmUmGmCmU | |
| | | | | *mU*mU*mU | |
| G021867 | 493 | GCUCCUU | GCUCCUUUCUGG | mG*mC*mU*CCUUUCUG | chr6: 29945018- |
| | | UCUGGUA | UAUCUCACGUUU | GUAUCUCACGUUUUAG | 29945038 |
| | | UCUCAC | UAGAGCUAGAAA | AmGmCmUmAmGmAmAm | |
| | | | UAGCAAGUUAAA | AmUmAmGmCAAGUUAA | |
| | | | AUAAGGCUAGUC | AAUAAGGCUAGUCCGU | |
| | | | CGUUAUCAACUU | UAUCAmAmCmUmUmGm | |
| | | | GAAAAAGUGGCA | AmAmAmAmAmGmUmG | |
| | | | CCGAGUCGGUGC | mGmCmAmCmCmGmAmG | |
| | | | UUUU | mUmCmGmGmUmGmCmU | |
| | | | | *mU*mU*mU | |
| G021868 | 494 | GCUAUGG | GCUAUGGGGUUU | mG*mC*mU*AUGGGGUU | chr6: 29945341- |
| | | GGUUUCU | CUUUGCAUGUUU | UCUUUGCAUGUUUUAG | 29945361 |
| | | UUGCAU | UAGAGCUAGAAA | AmGmCmUmAmGmAmAm | |
| | | | UAGCAAGUUAAA | AmUmAmGmCAAGUUAA | |
| | | | AUAAGGCUAGUC | AAUAAGGCUAGUCCGU | |
| | | | CGUUAUCAACUU | UAUCAmAmCmUmUmGm | |
| | | | GAAAAAGUGGCA | AmAmAmAmAmGmUmG | |
| | | | CCGAGUCGGUGC | mGmCmAmCmCmGmAmG | |
| | | | UUUU | mUmCmGmGmUmGmCmU | |
| | | | | *mU*mU*mU | |
| G021869 | 495 | GCCUUUG | GCCUUUGCAGAA | mG*mC*mC*UUUGCAGA | chr6: 29945526- |
| | | CAGAAAC | ACAAAGUCGUUU | AACAAAGUCGUUUUAG | 29945546 |
| | | AAAGUC | UAGAGCUAGAAA | AmGmCmUmAmGmAmAm | |
| | | | UAGCAAGUUAAA | AmUmAmGmCAAGUUAA | |
| | | | AUAAGGCUAGUC | AAUAAGGCUAGUCCGU | |
| | | | CGUUAUCAACUU | UAUCAmAmCmUmUmGm | |
| | | | GAAAAAGUGGCA | AmAmAmAmAmGmUmG | |
| | | | CCGAGUCGGUGC | mGmCmAmCmCmGmAmG | |
| | | | UUUU | mUmCmGmGmUmGmCmU | |
| | | | | *mU*mU*mU | |
| G021870 | 496 | UGGACCA | UGGACCAACCGC | mU*mG*mG*ACCAACCG | chr6: 29944880- |
| | | ACCGCCC | CCUCCUGAGUUU | CCCUCCUGAGUUUUAG | 29944900 |
| | | UCCUGA | UAGAGCUAGAAA | AmGmCmUmAmGmAmAm | (mismatch to |
| | | | UAGCAAGUUAAA | AmUmAmGmCAAGUUAA | hg38 = 2) |
| | | | AUAAGGCUAGUC | AAUAAGGCUAGUCCGU | |
| | | | CGUUAUCAACUU | UAUCAmAmCmUmUmGm | |
| | | | GAAAAAGUGGCA | AmAmAmAmAmGmUmG | |
| | | | CCGAGUCGGUGC | mGmCmAmCmCmGmAmG | |
| | | | UUUU | mUmCmGmGmUmGmCmU | |
| | | | | *mU*mU*mU | |
| G021871 | 497 | AGCCUCU | AGCCUCUCUGAC | mA*mG*mC*CUCUCUGA | Na |
| | | CUGACCU | CUUUAGCAGUUU | CCUUUAGCAGUUUUAG | |
| | | UUAGCA | UAGAGCUAGAAA | AmGmCmUmAmGmAmAm | |
| | | | UAGCAAGUUAAA | AmUmAmGmCAAGUUAA | |
| | | | AUAAGGCUAGUC | AAUAAGGCUAGUCCGU | |
| | | | CGUUAUCAACUU | UAUCAmAmCmUmUmGm | |
| | | | GAAAAAGUGGCA | AmAmAmAmAmGmUmG | |
| | | | CCGAGUCGGUGC | mGmCmAmCmCmGmAmG | |
| | | | UUUU | mUmCmGmGmUmGmCmU | |
| | | | | *mU*mU*mU | |
| G021872 | 498 | CGCCCUC | CGCCCUCCUGAA | mC*mG*mC*CCUCCUGA | Na |
| | | CUGAAGG | GGUCCUCAGUUU | AGGUCCUCAGUUUUAG | |
| | | UCCUCA | UAGAGCUAGAAA | AmGmCmUmAmGmAmAm | |
| | | | UAGCAAGUUAAA | AmUmAmGmCAAGUUAA | |
| | | | AUAAGGCUAGUC | AAUAAGGCUAGUCCGU | |
| | | | CGUUAUCAACUU | UAUCAmAmCmUmUmGm | |
| | | | GAAAAAGUGGCA | AmAmAmAmAmGmUmG | |
| | | | CCGAGUCGGUGC | mGmCmAmCmCmGmAmG | |
| | | | UUUU | mUmCmGmGmUmGmCmU | |
| | | | | *mU*mU*mU | |
| G021873 | 500 | CCGCCCU | CCGCCCUCCUGA | mC*mC*mG*CCCUCCUG | Na |
| | | CCUGAAG | AGGUCCUCGUUU | AAGGUCCUCGUUUUAG | |
| | | GUCCUC | UAGAGCUAGAAA | AmGmCmUmAmGmAmAm | |
| | | | UAGCAAGUUAAA | AmUmAmGmCAAGUUAA | |
| | | | AUAAGGCUAGUC | AAUAAGGCUAGUCCGU | |
| | | | CGUUAUCAACUU | UAUCAmAmCmUmUmGm | |
| | | | GAAAAAGUGGCA | AmAmAmAmAmGmUmG | |
| | | | CCGAGUCGGUGC | mGmCmAmCmCmGmAmG | |
| | | | UUUU | mUmCmGmGmUmGmCmU | |
| | | | | *mU*mU*mU | |
| G021874 | 501 | UGGUUCC | UGGUUCCCUUUG | mU*mG*mG*UUCCCUUU | chr6: 29943794- |
| | | CUUUGAC | ACACACACGUUU | GACACACACGUUUUAG | 29943814 |
| | | ACACAC | UAGAGCUAGAAA | AmGmCmUmAmGmAmAm | (mismatch to |
| | | | UAGCAAGUUAAA | AmUmAmGmCAAGUUAA | hg38 = 3) |
| | | | AUAAGGCUAGUC | AAUAAGGCUAGUCCGU | |
| | | | CGUUAUCAACUU | UAUCAmAmCmUmUmGm | |
| | | | GAAAAAGUGGCA | AmAmAmAmAmGmUmG | |
| | | | CCGAGUCGGUGC | mGmCmAmCmCmGmAmG | |
| | | | UUUU | mUmCmGmGmUmGmCmU | |
| | | | | *mU*mU*mU | |
| G021875 | 502 | GACCCUG | GACCCUGCUAAA | mG*mA*mC*CCUGCUAA | na |
| | | CUAAAGG | GGUCAGAGGUUU | AGGUCAGAGGUUUUAG | |
| | | UCAGAG | UAGAGCUAGAAA | AmGmCmUmAmGmAmAm | |
| | | | UAGCAAGUUAAA | AmUmAmGmCAAGUUAA | |
| | | | AUAAGGCUAGUC | AAUAAGGCUAGUCCGU | |
| | | | CGUUAUCAACUU | UAUCAmAmCmUmUmGm | |
| | | | GAAAAAGUGGCA | AmAmAmAmAmGmUmG | |
| | | | CCGAGUCGGUGC | mGmCmAmCmCmGmAmG | |
| | | | UUUU | mUmCmGmGmUmGmCmU | |
| | | | | *mU*mU*mU | |
| G021876 | 503 | AGGACCU | AGGACCUUCAGG | mA*mG*mG*ACCUUCAG | na |
| | | UCAGGAG | AGGGCGGUGUUU | GAGGGCGGUGUUUUAG | |
| | | GGCGGU | UAGAGCUAGAAA | AmGmCmUmAmGmAmAm | |
| | | | UAGCAAGUUAAA | AmUmAmGmCAAGUUAA | |
| | | | AUAAGGCUAGUC | AAUAAGGCUAGUCCGU | |
| | | | CGUUAUCAACUU | UAUCAmAmCmUmUmGm | |
| | | | GAAAAAGUGGCA | AmAmAmAmAmGmUmG | |
| | | | CCGAGUCGGUGC | mGmCmAmCmCmGmAmG | |
| | | | UUUU | mUmCmGmGmUmGmCmU | |
| | | | | *mU*mU*mU | |
| G021877 | 504 | GCACACU | GCACACUUCUAC | mG*mC*mA*CACUUCUA | chr6: 29944671- |
| | | UCUACCU | CUGGGUCUGUUU | CCUGGGUCUGUUUUAG | 29944691 |
| | | GGGUCU | UAGAGCUAGAAA | AmGmCmUmAmGmAmAm | (mismatch to |
| | | | UAGCAAGUUAAA | AmUmAmGmCAAGUUAA | hg38 = 3) |
| | | | AUAAGGCUAGUC | AAUAAGGCUAGUCCGU | |
| | | | CGUUAUCAACUU | UAUCAmAmCmUmUmGm | |
| | | | GAAAAAGUGGCA | AmAmAmAmAmGmUmG | |
| | | | CCGAGUCGGUGC | mGmCmAmCmCmGmAmG | |
| | | | UUUU | mUmCmGmGmUmGmCmU | |
| | | | | *mU*mU*mU | |
| G021878 | 505 | GAGCCUC | GAGCCUCUCUGA | mG*mA*mG*CCUCUCUG | na |
| | | UCUGACC | CCUUUAGCGUUU | ACCUUUAGCGUUUUAG | |
| | | UUUAGC | UAGAGCUAGAAA | AmGmCmUmAmGmAmAm | |
| | | | UAGCAAGUUAAA | AmUmAmGmCAAGUUAA | |
| | | | AUAAGGCUAGUC | AAUAAGGCUAGUCCGU | |
| | | | CGUUAUCAACUU | UAUCAmAmCmUmUmGm | |
| | | | GAAAAAGUGGCA | AmAmAmAmAmGmUmG | |
| | | | CCGAGUCGGUGC | mGmCmAmCmCmGmAmG | |
| | | | UUUU | mUmCmGmGmUmGmCmU | |
| | | | | *mU*mU*mU | |
| G021879 | 506 | ACACUCC | ACACUCCUCCAG | mA*mC*mA*CUCCUCCA | chr6: 29944054- |
| | | UCCAGCA | CACACAUGGUUU | GCACACAUGGUUUUAG | 29944074 |
| | | CACAUG | UAGAGCUAGAAA | AmGmCmUmAmGmAmAm | (mismatch to |
| | | | UAGCAAGUUAAA | AmUmAmGmCAAGUUAA | hg38 = 2) |
| | | | AUAAGGCUAGUC | AAUAAGGCUAGUCCGU | |
| | | | CGUUAUCAACUU | UAUCAmAmCmUmUmGm | |
| | | | GAAAAAGUGGCA | AmAmAm AmAmGmUmG | |
| | | | CCGAGUCGGUGC | mGmCmAmCmCmGmAmG | |
| | | | UUUU | mUmCmGmGmUmGmCmU | |
| | | | | *mU*mU*mU | |
| G021880 | 507 | CUCUGAC | CUCUGACCUUUA | mC*mU*mC*UGACCUUU | na |
| | | CUUUAGC | GCAGGGUCGUUU | AGCAGGGUCGUUUUAG | |
| | | AGGGUC | UAGAGCUAGAAA | AmGmCmUmAmGmAmAm | |
| | | | UAGCAAGUUAAA | AmUmAmGmCAAGUUAA | |
| | | | AUAAGGCUAGUC | AAUAAGGCUAGUCCGU | |
| | | | CGUUAUCAACUU | UAUCAmAmCmUmUmGm | |
| | | | GAAAAAGUGGCA | AmAmAmAmAmGmUmG | |
| | | | CCGAGUCGGUGC | mGmCmAmCmCmGmAmG | |
| | | | UUUU | mUmCmGmGmUmGmCmU | |
| | | | | *mU*mU*mU | |
| G021881 | 508 | CAAGAUA | CAAGAUAGCCAC | mC*mA*mA*GAUAGCCA | chr6: 29944043- |
| | | GCCACAU | AUGUGUGCGUUU | CAUGUGUGCGUUUUAG | 29944063 |
| | | GUGUGC | UAGAGCUAGAAA | AmGmCmUmAmGmAmAm | (mismatch to |
| | | | UAGCAAGUUAAA | AmUmAmGmCAAGUUAA | hg38 = 2) |
| | | | AUAAGGCUAGUC | AAUAAGGCUAGUCCGU | |
| | | | CGUUAUCAACUU | UAUCAmAmCmUmUmGm | |
| | | | GAAAAAGUGGCA | AmAmAmAmAmGmUmG | |
| | | | CCGAGUCGGUGC | mGmCmAmCmCmGmAmG | |
| | | | UUUU | mUmCmGmGmUmGmCmU | |
| | | | | *mU*mU*mU | |
| G021882 | 509 | UCUGACC | UCUGACCUUUAG | mU*mC*mU*GACCUUUA | chr6: 29944450- |
| | | UUUAGCA | CAGGGUCAGUUU | GCAGGGUCAGUUUUAG | 29944470 |
| | | GGGUCA | UAGAGCUAGAAA | AmGmCmUmAmGmAmAm | (mismatch to |
| | | | UAGCAAGUUAAA | AmUmAmGmCAAGUUAA | hg38 = 3) |
| | | | AUAAGGCUAGUC | AAUAAGGCUAGUCCGU | |
| | | | CGUUAUCAACUU | UAUCAmAmCmUmUmGm | |
| | | | GAAAAAGUGGCA | AmAmAmAmAmGmUmG | |
| | | | CCGAGUCGGUGC | mGmCmAmCmCmGmAmG | |
| | | | UUUU | mUmCmGmGmUmGmCmU | |
| | | | | *mU*mU*mU | |
| G021883 | 510 | UGUAAAG | UGUAAAGGUGAG | mU*mG*mU*AAAGGUGA | chr6: 29945274- |
| | | GUGAGAG | AGCCUGGAGUUU | GAGCCUGGAGUUUUAG | 29945294 |
| | | CCUGGA | UAGAGCUAGAAA | AmGmCmUmAmGmAmAm | (mismatch to |
| | | | UAGCAAGUUAAA | AmUmAmGmCAAGUUAA | hg38 = 1) |
| | | | AUAAGGCUAGUC | AAUAAGGCUAGUCCGU | |
| | | | CGUUAUCAACUU | UAUCAmAmCmUmUmGm | |
| | | | GAAAAAGUGGCA | AmAmAmAmAmGmUmG | |
| | | | CCGAGUCGGUGC | mGmCmAmCmCmGmAmG | |
| | | | UUUU | mUmCmGmGmUmGmCmU | |
| | | | | *mU*mU*mU | |
| G021884 | 511 | GAAGGUC | GAAGGUCCCUGA | mG*mA*mA*GGUCCCUG | chr6: 29944859- |
| | | CCUGAGG | GGACCUUCGUUU | AGGACCUUCGUUUUAG | 29944879 |
| | | ACCUUC | UAGAGCUAGAAA | AmGmCmUmAmGmAmAm | (mismatch to |
| | | | UAGCAAGUUAAA | AmUmAmGmCAAGUUAA | hg38 = 3) |
| | | | AUAAGGCUAGUC | AAUAAGGCUAGUCCGU | |
| | | | CGUUAUCAACUU | UAUCAmAmCmUmUmGm | |
| | | | GAAAAAGUGGCA | AmAmAmAmAmGmUmG | |
| | | | CCGAGUCGGUGC | mGmCmAmCmCmGmAmG | |
| | | | UUUU | mUmCmGmGmUmGmCmU | |
| | | | | *mU*mU*mU | |

*The guide sequence disclosed in this Table may be unmodified, modified with the exemplary modification pattern shown in the Table, or modified with a different modification pattern disclosed herein or available in the art.

TABLE 7
Additional Exemplary HLA-A Nme guide sequences

| | SEQ ID | | Exemplary | Exemplary Guide | |
|---|---|---|---|---|---|
| | NO to | | Guide RNA Full | RNA Modified | |
| | the | | Sequence | Sequence | Genomic |
| Guide | Guide | Guide | (SEQ ID NOs: | (SEQ ID NOs: | Coordinates |
| ID | Sequence | Sequence | 1512-1590) | 2512-2590) | (hg38) |
| G028854 | 512 | CCUGGGUCU | CCUGGGUCU | mC*mC*mU*mGmGG | chr6:29944223- |
| | | GGUCCUCCCC | GGUCCUCCCC | UmCmUGmGUmCCU | 29944247 |
| | | AUCCC | AUCCCGUUG | CCmCCAUmCCCmG | |
| | | | UAGCUCCCUG | UUGmUmAmGmCUC | |
| | | | AAACCGUUG | CCmUmGmAmAmAm | |
| | | | CUACAAUAA | CmCGUUmGmCUAm | |
| | | | GGCCGUCGA | CAAU*AAGmGmCC | |
| | | | AAGAUGUGC | mGmUmCmGmAmA | |
| | | | CGCAACGCUC | mAmGmAmUGUGCm | |
| | | | UGCCUUCUG | CGmCAAmCGCUCU | |
| | | | GCAUCGUU | mGmCCmUmUmCmU | |
| | | | | GGCAUCG*mU*mU | |
| G028855 | 513 | GUGGAGACC | GUGGAGACC | mG*mU*mG*mGmA | chr6:29944264- |
| | | AGGCCUGCA | AGGCCUGCA | GAmCmCAmGGmCC | 29944288 |
| | | GGGGAU | GGGGAUGUU | UGCmAGGGmGAUm | |
| | | | GUAGCUCCCU | GUUGmUmAmGmCU | |
| | | | GAAACCGUU | CCCmUmGmAmAmA | |
| | | | GCUACAAUA | mCmCGUUmGmCUA | |
| | | | AGGCCGUCG | mCAAU*AAGmGmC | |
| | | | AAAGAUGUG | CmGmUmCmGmAmA | |
| | | | CCGCAACGCU | mAmGmAmUGUGCm | |
| | | | CUGCCUUCUG | CGmCAAmCGCUCU | |
| | | | GCAUCGUU | mGmCCmUmUmCmU | |
| | | | | GGCAUCG*mU*mU | |
| G028856 | 514 | CCGUGUCCUG | CCGUGUCCUG | mC*mC*mG*mUmGU | chr6:29944229- |
| | | GGUCUGGUC | GGUCUGGUC | CmCmUGmGGmUCU | 29944253 |
| | | CUCCC | CUCCCGUUGU | GGmUCCUmCCCmG | |
| | | | AGCUCCCUGA | UUGmUmAmGmCUC | |
| | | | AACCGUUGC | CCmUmGmAmAmAm | |
| | | | UACAAUAAG | CmCGUUmGmCUAm | |
| | | | GCCGUCGAA | CAAU*AAGmGmCC | |
| | | | AGAUGUGCC | mGmUmCmGmAmA | |
| | | | GCAACGCUCU | mAmGmAmUGUGCm | |
| | | | GCCUUCUGGC | CGmCAAmCGCUCU | |
| | | | AUCGUU | mGmCCmUmUmCmU | |
| | | | | GGCAUCG*mU*mU | |
| G028857 | 515 | UCCGUGUCCU | UCCGUGUCCU | mU*mC*mC*mGmUG | chr6:29944230- |
| | | GGGUCUGGU | GGGUCUGGU | UmCmCUmGGmGUC | 29944254 |
| | | CCUCC | CCUCCGUUGU | UGmGUCCmUCCmG | |
| | | | AGCUCCCUGA | UUGmUmAmGmCUC | |
| | | | AACCGUUGC | CCmUmGmAmAmAm | |
| | | | UACAAUAAG | CmCGUUmGmCUAm | |
| | | | GCCGUCGAA | CAAU*AAGmGmCC | |
| | | | AGAUGUGCC | mGmUmCmGmAmA | |
| | | | GCAACGCUCU | mAmGmAmUGUGCm | |
| | | | GCCUUCUGGC | CGmCAAmCGCUCU | |
| | | | AUCGUU | mGmCCmUmUmCmU | |
| | | | | GGCAUCG*mU*mU | |
| G028858 | 516 | CACAUGGCA | CACAUGGCA | mC*mA*mC*mAmUG | chr6:29944327- |
| | | GGUGUAUCU | GGUGUAUCU | GmCmAGmGUmGUA | 29944351 |
| | | CUGCUC | CUGCUCGUU | UCmUCUGmCUCmG | |
| | | | GUAGCUCCCU | UUGmUmAmGmCUC | |
| | | | GAAACCGUU | CCmUmGmAmAmAm | |
| | | | GCUACAAUA | CmCGUUmGmCUAm | |
| | | | AGGCCGUCG | CAAU*AAGmGmCC | |
| | | | AAAGAUGUG | mGmUmCmGmAmA | |
| | | | CCGCAACGCU | mAmGmAmUGUGCm | |
| | | | CUGCCUUCUG | CGmCAAmCGCUCU | |
| | | | GCAUCGUU | mGmCCmUmUmCmU | |
| | | | | GGCAUCG*mU*mU | |
| G028859 | 517 | UGCUGCACA | UGCUGCACA | mU*mG*mC*mUmGC | chr6:29944332- |
| | | UGGCAGGUG | UGGCAGGUG | AmCmAUmGGmCAG | 29944356 |
| | | UAUCUC | UAUCUCGUU | GUmGUAUmCUCmG | |
| | | | GUAGCUCCCU | UUGmUmAmGmCUC | |
| | | | GAAACCGUU | CCmUmGmAmAmAm | |
| | | | GCUACAAUA | CmCGUUmGmCUAm | |
| | | | AGGCCGUCG | CAAU*AAGmGmCC | |
| | | | AAAGAUGUG | mGmUmCmGmAmA | |
| | | | CCGCAACGCU | mAmGmAmUGUGCm | |
| | | | CUGCCUUCUG | CGmCAAmCGCUCU | |
| | | | GCAUCGUU | mGmCCmUmUmCmU | |
| | | | | GGCAUCG*mU*mU | |
| G028860 | 518 | CCGCACGAAC | CCGCACGAAC | mC*mC*mG*mCmAC | chr6:29942830- |
| | | UGCGUGUCG | UGCGUGUCG | GmAmACmUGmCGU | 29942854 |
| | | UCCAC | UCCACGUUG | GUmCGUCmCACmG | |
| | | | UAGCUCCCUG | UUGmUmAmGmCUC | |
| | | | AAACCGUUG | CCmUmGmAmAmAm | |
| | | | CUACAAUAA | CmCGUUmGmCUAm | |
| | | | GGCCGUCGA | CAAU*AAGmGmCC | |
| | | | AAGAUGUGC | mGmUmCmGmAmA | |
| | | | CGCAACGCUC | mAmGmAmUGUGCm | |
| | | | UGCCUUCUG | CGmCAAmCGCUCU | |
| | | | GCAUCGUU | mGmCCmUmUmCmU | |
| | | | | GGCAUCG*mU*mU | |
| G028861 | 519 | CGCACGAACU | CGCACGAACU | mC*mG*mC*mAmCG | chr6:29942829- |
| | | GCGUGUCGU | GCGUGUCGU | AmAmCUmGCmGUG | 29942853 |
| | | CCACG | CCACGGUUG | UCmGUCCmACGmG | |
| | | | UAGCUCCCUG | UUGmUmAmGmCUC | |
| | | | AAACCGUUG | CCmUmGmAmAmAm | |
| | | | CUACAAUAA | CmCGUUmGmCUAm | |
| | | | GGCCGUCGA | CAAU*AAGmGmCC | |
| | | | AAGAUGUGC | mGmUmCmGmAmA | |
| | | | CGCAACGCUC | mAmGmAmUGUGCm | |
| | | | UGCCUUCUG | CGmCAAmCGCUCU | |
| | | | GCAUCGUU | mGmCCmUmUmCmU | |
| | | | | GGCAUCG*mU*mU | |
| G028862 | 520 | GUGCGCUGC | GUGCGCUGC | mG*mU*mG*mCmGC | chr6:29943511- |
| | | AGCGUCUCCU | AGCGUCUCCU | UmGmCAmGCmGUC | 29943535 |
| | | UCCCG | UCCCGGUUG | UCmCUUCmCCGmG | |
| | | | UAGCUCCCUG | UUGmUmAmGmCUC | |
| | | | AAACCGUUG | CCmUmGmAmAmAm | |
| | | | CUACAAUAA | CmCGUUmGmCUAm | |
| | | | GGCCGUCGA | CAAU*AAGmGmCC | |
| | | | AAGAUGUGC | mGmUmCmGmAmA | |
| | | | CGCAACGCUC | mAmGmAmUGUGCm | |
| | | | UGCCUUCUG | CGmCAAmCGCUCU | |
| | | | GCAUCGUU | mGmCCmUmUmCmU | |
| | | | | GGCAUCG*mU*mU | |
| G028863 | 521 | CCGAGGAUG | CCGAGGAUG | mC*mC*mG*mAmGG | chr6:29942547- |
| | | GCCGUCAUG | GCCGUCAUG | AmUmGGmCCmGUC | 29942571 |
| | | GCGCCC | GCGCCCGUUG | AUmGGCGmCCCmG | |
| | | | UAGCUCCCUG | UUGmUmAmGmCUC | |
| | | | AAACCGUUG | CCmUmGmAmAmAm | |
| | | | CUACAAUAA | CmCGUUmGmCUAm | |
| | | | GGCCGUCGA | CAAU*AAGmGmCC | |
| | | | AAGAUGUGC | mGmUmCmGmAmA | |
| | | | CGCAACGCUC | mAmGmAmUGUGCm | |
| | | | UGCCUUCUG | CGmCAAmCGCUCU | |
| | | | GCAUCGUU | mGmCCmUmUmCmU | |
| | | | | GGCAUCG*mU*mU | |
| G028864 | 522 | CGAGGAUGG | CGAGGAUGG | mC*mG*mA*mGmGA | chr6:29942548- |
| | | CCGUCAUGGC | CCGUCAUGGC | UmGmGCmCGmUCA | 29942572 |
| | | GCCCC | GCCCCGUUGU | UGmGCGCmCCCmG | |
| | | | AGCUCCCUGA | UUGmUmAmGmCUC | |
| | | | AACCGUUGC | CCmUmGmAmAmAm | |
| | | | UACAAUAAG | CmCGUUmGmCUAm | |
| | | | GCCGUCGAA | CAAU*AAGmGmCC | |
| | | | AGAUGUGCC | mGmUmCmGmAmA | |
| | | | GCAACGCUCU | mAmGmAmUGUGCm | |
| | | | GCCUUCUGGC | CGmCAAmCGCUCU | |
| | | | AUCGUU | mGmCCmUmUmCmU | |
| | | | | GGCAUCG*mU*mU | |
| G028865 | 523 | AAGGUUCCA | AAGGUUCCA | mA*mA*mG*mGmU | chr6:29944266- |
| | | UCCCCUGCAG | UCCCCUGCAG | UCmCmAUmCCmCC | 29944290 |
| | | GCCUG | GCCUGGUUG | UGCmAGGCmCUGm | |
| | | | UAGCUCCCUG | GUUGmUmAmGmCU | |
| | | | AAACCGUUG | CCCmUmGmAmAmA | |
| | | | CUACAAUAA | mCmCGUUmGmCUA | |
| | | | GGCCGUCGA | mCAAU*AAGmGmC | |
| | | | AAGAUGUGC | CmGmUmCmGmAmA | |
| | | | CGCAACGCUC | mAmGmAmUGUGCm | |
| | | | UGCCUUCUG | CGmCAAmCGCUCU | |
| | | | GCAUCGUU | mGmCCmUmUmCmU | |
| | | | | GGCAUCG*mU*mU | |
| G028866 | 524 | AGACCAGGCC | AGACCAGGCC | mA*mG*mA*mCmCA | chr6:29944268- |
| | | UGCAGGGGA | UGCAGGGGA | GmGmCCmUGmCAG | 29944292 |
| | | UGGAA | UGGAAGUUG | GGmGAUGmGAAmG | |
| | | | UAGCUCCCUG | UUGmUmAmGmCUC | |
| | | | AAACCGUUG | CCmUmGmAmAmAm | |
| | | | CUACAAUAA | CmCGUUmGmCUAm | |
| | | | GGCCGUCGA | CAAU*AAGmGmCC | |
| | | | AAGAUGUGC | mGmUmCmGmAmA | |
| | | | CGCAACGCUC | mAmGmAmUGUGCm | |
| | | | UGCCUUCUG | CGmCAAmCGCUCU | |
| | | | GCAUCGUU | mGmCCmUmUmCmU | |
| | | | | GGCAUCG*mU*mU | |
| G028867 | 525 | ACUUCUGGA | ACUUCUGGA | mA*mC*mU*mUmCU | chr6:29944274- |
| | | AGGUUCCAU | AGGUUCCAU | GmGmAAmGGmUUC | 29944298 |
| | | CCCCUG | CCCCUGGUUG | CAmUCCCmCUGmG | |
| | | | UAGCUCCCUG | UUGmUmAmGmCUC | |
| | | | AAACCGUUG | CCmUmGmAmAmAm | |
| | | | CUACAAUAA | CmCGUUmGmCUAm | |
| | | | GGCCGUCGA | CAAU*AAGmGmCC | |
| | | | AAGAUGUGC | mGmUmCmGmAmA | |
| | | | CGCAACGCUC | mAmGmAmUGUGCm | |
| | | | UGCCUUCUG | CGmCAAmCGCUCU | |
| | | | GCAUCGUU | mGmCCmUmUmCmU | |
| | | | | GGCAUCG*mU*mU | |
| G028868 | 526 | CGAUGAAGC | CGAUGAAGC | mC*mG*mA*mUmGA | chr6:29942795- |
| | | GGGGCUCCCC | GGGGCUCCCC | AmGmCGmGGmGCU | 29942819 |
| | | GCGGC | GCGGCGUUG | CCmCCGCmGGCmG | |
| | | | UAGCUCCCUG | UUGmUmAmGmCUC | |
| | | | AAACCGUUG | CCmUmGmAmAmAm | |
| | | | CUACAAUAA | CmCGUUmGmCUAm | |
| | | | GGCCGUCGA | CAAU*AAGmGmCC | |
| | | | AAGAUGUGC | mGmUmCmGmAmA | |
| | | | CGCAACGCUC | mAmGmAmUGUGCm | |
| | | | UGCCUUCUG | CGmCAAmCGCUCU | |
| | | | GCAUCGUU | mGmCCmUmUmCmU | |
| | | | | GGCAUCG*mU*mU | |
| G028869 | 527 | UCCGUGUCCC | UCCGUGUCCC | mU*mC*mC*mGmUG | chr6:29942785- |
| | | GGCCCGGCCG | GGCCCGGCCG | UmCmCCmGGmCCC | 29942809 |
| | | CGGG | CGGGGUUGU | GGmCCGCmGGGmG | |
| | | | AGCUCCCUGA | UUGmUmAmGmCUC | |
| | | | AACCGUUGC | CCmUmGmAmAmAm | |
| | | | UACAAUAAG | CmCGUUmGmCUAm | |
| | | | GCCGUCGAA | CAAU*AAGmGmCC | |
| | | | AGAUGUGCC | mGmUmCmGmAmA | |
| | | | GCAACGCUCU | mAmGmAmUGUGCm | |
| | | | GCCUUCUGGC | CGmCAAmCGCUCU | |
| | | | AUCGUU | mGmCCmUmUmCmU | |
| | | | | GGCAUCG*mU*mU | |
| G028870 | 528 | CCGUGUCCCG | CCGUGUCCCG | mC*mC*mG*mUmGU | chr6:29942786- |
| | | GCCCGGCCGC | GCCCGGCCGC | CmCmCGmGCmCCG | 29942810 |
| | | GGGG | GGGGGUUGU | GCmCGCGmGGGmG | |
| | | | AGCUCCCUGA | UUGmUmAmGmCUC | |
| | | | AACCGUUGC | CCmUmGmAmAmAm | |
| | | | UACAAUAAG | CmCGUUmGmCUAm | |
| | | | GCCGUCGAA | CAAU*AAGmGmCC | |
| | | | AGAUGUGCC | mGmUmCmGmAmA | |
| | | | GCAACGCUCU | mAmGmAmUGUGCm | |
| | | | GCCUUCUGGC | CGmCAAmCGCUCU | |
| | | | AUCGUU | mGmCCmUmUmCmU | |
| | | | | GGCAUCG*mU*mU | |
| G028871 | 529 | CAGACGCCGA | CAGACGCCGA | mC*mA*mG*mAmCG | chr6:29942541- |
| | | GGAUGGCCG | GGAUGGCCG | CmCmGAmGGmAUG | 29942565 |
| | | UCAUG | UCAUGGUUG | GCmCGUCmAUGmG | |
| | | | UAGCUCCCUG | UUGmUmAmGmCUC | |
| | | | AAACCGUUG | CCmUmGmAmAmAm | |
| | | | CUACAAUAA | CmCGUUmGmCUAm | |
| | | | GGCCGUCGA | CAAU*AAGmGmCC | |
| | | | AAGAUGUGC | mGmUmCmGmAmA | |
| | | | CGCAACGCUC | mAmGmAmUGUGCm | |
| | | | UGCCUUCUG | CGmCAAmCGCUCU | |
| | | | GCAUCGUU | mGmCCmUmUmCmU | |
| | | | | GGCAUCG*mU*mU | |
| G028872 | 530 | CCAGACGCCG | CCAGACGCCG | mC*mC*mA*mGmAC | chr6:29942540- |
| | | AGGAUGGCC | AGGAUGGCC | GmCmCGmAGmGAU | 29942564 |
| | | GUCAU | GUCAUGUUG | GGmCCGUmCAUmG | |
| | | | UAGCUCCCUG | UUGmUmAmGmCUC | |
| | | | AAACCGUUG | CCmUmGmAmAmAm | |
| | | | CUACAAUAA | CmCGUUmGmCUAm | |
| | | | GGCCGUCGA | CAAU*AAGmGmCC | |
| | | | AAGAUGUGC | mGmUmCmGmAmA | |
| | | | CGCAACGCUC | mAmGmAmUGUGCm | |
| | | | UGCCUUCUG | CGmCAAmCGCUCU | |
| | | | GCAUCGUU | mGmCCmUmUmCmU | |
| | | | | GGCAUCG*mU*mU | |
| G028873 | 531 | AGACGCCGA | AGACGCCGA | mA*mG*mA*mCmGC | chr6:29942542- |
| | | GGAUGGCCG | GGAUGGCCG | CmGmAGmGAmUGG | 29942566 |
| | | UCAUGG | UCAUGGGUU | CCmGUCAmUGGmG | |
| | | | GUAGCUCCCU | UUGmUmAmGmCUC | |
| | | | GAAACCGUU | CCmUmGmAmAmAm | |
| | | | GCUACAAUA | CmCGUUmGmCUAm | |
| | | | AGGCCGUCG | CAAU*AAGmGmCC | |
| | | | AAAGAUGUG | mGmUmCmGmAmA | |
| | | | CCGCAACGCU | mAmGmAmUGUGCm | |
| | | | CUGCCUUCUG | CGmCAAmCGCUCU | |
| | | | GCAUCGUU | mGmCCmUmUmCmU | |
| | | | | GGCAUCG*mU*mU | |
| G028874 | 532 | CUGUCGAACC | CUGUCGAACC | mC*mU*mG*mUmCG | chr6:29942838- |
| | | GCACGAACU | GCACGAACU | AmAmCCmGCmACG | 29942862 |
| | | GCGUG | GCGUGGUUG | AAmCUGCmGUGmG | |
| | | | UAGCUCCCUG | UUGmUmAmGmCUC | |
| | | | AAACCGUUG | CCmUmGmAmAmAm | |
| | | | CUACAAUAA | CmCGUUmGmCUAm | |
| | | | GGCCGUCGA | CAAU*AAGmGmCC | |
| | | | AAGAUGUGC | mGmUmCmGmAmA | |
| | | | CGCAACGCUC | mAmGmAmUGUGCm | |
| | | | UGCCUUCUG | CGmCAAmCGCUCU | |
| | | | GCAUCGUU | mGmCCmUmUmCmU | |
| | | | | GGCAUCG*mU*mU | |
| G028875 | 533 | UCGUGCGGU | UCGUGCGGU | mU*mC*mG*mUmGC | chr6:29942852- |
| | | UCGACAGCG | UCGACAGCG | GmGmUUmCGmACA | 29942876 |
| | | ACGCCG | ACGCCGGUU | GCmGACGmCCGmG | |
| | | | GUAGCUCCCU | UUGmUmAmGmCUC | |
| | | | GAAACCGUU | CCmUmGmAmAmAm | |
| | | | GCUACAAUA | CmCGUUmGmCUAm | |
| | | | AGGCCGUCG | CAAU*AAGmGmCC | |
| | | | AAAGAUGUG | mGmUmCmGmAmA | |
| | | | CCGCAACGCU | mAmGmAmUGUGCm | |
| | | | CUGCCUUCUG | CGmCAAmCGCUCU | |
| | | | GCAUCGUU | mGmCCmUmUmCmU | |
| | | | | GGCAUCG*mU*mU | |
| G028876 | 534 | CCAUCCCCAU | CCAUCCCCAU | mC*mC*mA*mUmCC | chr6:29944517- |
| | | CGUGGGCAU | CGUGGGCAU | CmCmAUmCGmUGG | 29944541 |
| | | CAUUG | CAUUGGUUG | GCmAUCAmUUGmG | |
| | | | UAGCUCCCUG | UUGmUmAmGmCUC | |
| | | | AAACCGUUG | CCmUmGmAmAmAm | |
| | | | CUACAAUAA | CmCGUUmGmCUAm | |
| | | | GGCCGUCGA | CAAU*AAGmGmCC | |
| | | | AAGAUGUGC | mGmUmCmGmAmA | |
| | | | CGCAACGCUC | mAmGmAmUGUGCm | |
| | | | UGCCUUCUG | CGmCAAmCGCUCU | |
| | | | GCAUCGUU | mGmCCmUmUmCmU | |
| | | | | GGCAUCG*mU*mU | |
| G028877 | 535 | UCCUCUGGCU | UCCUCUGGCU | mU*mC*mC*mUmCU | chr6:29942858- |
| | | CGCGGCGUCG | CGCGGCGUCG | GmGmCUmCGmCGG | 29942882 |
| | | CUGU | CUGUGUUGU | CGmUCGCmUGUmG | |
| | | | AGCUCCCUGA | UUGmUmAmGmCUC | |
| | | | AACCGUUGC | CCmUmGmAmAmAm | |
| | | | UACAAUAAG | CmCGUUmGmCUAm | |
| | | | GCCGUCGAA | CAAU*AAGmGmCC | |
| | | | AGAUGUGCC | mGmUmCmGmAmA | |
| | | | GCAACGCUCU | mAmGmAmUGUGCm | |
| | | | GCCUUCUGGC | CGmCAAmCGCUCU | |
| | | | AUCGUU | mGmCCmUmUmCmU | |
| | | | | GGCAUCG*mU*mU | |
| G028878 | 536 | CUCUGGUUG | CUCUGGUUG | mC*mU*mC*mUmGG | chr6:29942988- |
| | | UAGUAGCCG | UAGUAGCCG | UmUmGUmAGmUAG | 29943012 |
| | | CGCAGG | CGCAGGGUU | CCmGCGCmAGGmG | |
| | | | GUAGCUCCCU | UUGmUmAmGmCUC | |
| | | | GAAACCGUU | CCmUmGmAmAmAm | |
| | | | GCUACAAUA | CmCGUUmGmCUAm | |
| | | | AGGCCGUCG | CAAU*AAGmGmCC | |
| | | | AAAGAUGUG | mGmUmCmGmAmA | |
| | | | CCGCAACGCU | mAmGmAmUGUGCm | |
| | | | CUGCCUUCUG | CGmCAAmCGCUCU | |
| | | | GCAUCGUU | mGmCCmUmUmCmU | |
| | | | | GGCAUCG*mU*mU | |
| G028879 | 537 | ACCUGGGGA | ACCUGGGGA | mA*mC*mC*mUmGG | chr6:29942984- |
| | | CCCUGCGCGG | CCCUGCGCGG | GmGmACmCCmUGC | 29943008 |
| | | CUACU | CUACUGUUG | GCmGGCUmACUmG | |
| | | | UAGCUCCCUG | UUGmUmAmGmCUC | |
| | | | AAACCGUUG | CCmUmGmAmAmAm | |
| | | | CUACAAUAA | CmCGUUmGmCUAm | |
| | | | GGCCGUCGA | CAAU*AAGmGmCC | |
| | | | AAGAUGUGC | mGmUmCmGmAmA | |
| | | | CGCAACGCUC | mAmGmAmUGUGCm | |
| | | | UGCCUUCUG | CGmCAAmCGCUCU | |
| | | | GCAUCGUU | mGmCCmUmUmCmU | |
| | | | | GGCAUCG*mU*mU | |
| G028880 | 538 | CGCUCUGGU | CGCUCUGGU | mC*mG*mC*mUmCU | chr6:29942990- |
| | | UGUAGUAGC | UGUAGUAGC | GmGmUUmGUmAGU | 29943014 |
| | | CGCGCA | CGCGCAGUU | AGmCCGCmGCAmG | |
| | | | GUAGCUCCCU | UUGmUmAmGmCUC | |
| | | | GAAACCGUU | CCmUmGmAmAmAm | |
| | | | GCUACAAUA | CmCGUUmGmCUAm | |
| | | | AGGCCGUCG | CAAU*AAGmGmCC | |
| | | | AAAGAUGUG | mGmUmCmGmAmA | |
| | | | CCGCAACGCU | mAmGmAmUGUGCm | |
| | | | CUGCCUUCUG | CGmCAAmCGCUCU | |
| | | | GCAUCGUU | mGmCCmUmUmCmU | |
| | | | | GGCAUCG*mU*mU | |
| G028881 | 539 | GCUCUGGUU | GCUCUGGUU | mG*mC*mU*mCmUG | chr6:29942989- |
| | | GUAGUAGCC | GUAGUAGCC | GmUmUGmUAmGUA | 29943013 |
| | | GCGCAG | GCGCAGGUU | GCmCGCGmCAGmG | |
| | | | GUAGCUCCCU | UUGmUmAmGmCUC | |
| | | | GAAACCGUU | CCmUmGmAmAmAm | |
| | | | GCUACAAUA | CmCGUUmGmCUAm | |
| | | | AGGCCGUCG | CAAU*AAGmGmCC | |
| | | | AAAGAUGUG | mGmUmCmGmAmA | |
| | | | CCGCAACGCU | mAmGmAmUGUGCm | |
| | | | CUGCCUUCUG | CGmCAAmCGCUCU | |
| | | | GCAUCGUU | mGmCCmUmUmCmU | |
| | | | | GGCAUCG*mU*mU | |
| G028882 | 540 | UAUUUUUUU | UAUUUUUUU | mU*mA*mU*mUmU | chr6:29945435- |
| | | CUAUAGUGU | CUAUAGUGU | UUmUmUCmUAmUA | 29945459 |
| | | GAGACA | GAGACAGUU | GUGmUGAGmACAm | |
| | | | GUAGCUCCCU | GUUGmUmAmGmCU | |
| | | | GAAACCGUU | CCCmUmGmAmAmA | |
| | | | GCUACAAUA | mCmCGUUmGmCUA | |
| | | | AGGCCGUCG | mCAAU*AAGmGmC | |
| | | | AAAGAUGUG | CmGmUmCmGmAmA | |
| | | | CCGCAACGCU | mAmGmAmUGUGCm | |
| | | | CUGCCUUCUG | CGmCAAmCGCUCU | |
| | | | GCAUCGUU | mGmCCmUmUmCmU | |
| | | | | GGCAUCG*mU*mU | |
| G028883 | 541 | ACGCCUACGA | ACGCCUACGA | mA*mC*mG*mCmCU | chr6:29943342- |
| | | CGGCAAGGA | CGGCAAGGA | AmCmGAmCGmGCA | 29943366 |
| | | UUACA | UUACAGUUG | AGmGAUUmACAmG | |
| | | | UAGCUCCCUG | UUGmUmAmGmCUC | |
| | | | AAACCGUUG | CCmUmGmAmAmAm | |
| | | | CUACAAUAA | CmCGUUmGmCUAm | |
| | | | GGCCGUCGA | CAAU*AAGmGmCC | |
| | | | AAGAUGUGC | mGmUmCmGmAmA | |
| | | | CGCAACGCUC | mAmGmAmUGUGCm | |
| | | | UGCCUUCUG | CGmCAAmCGCUCU | |
| | | | GCAUCGUU | mGmCCmUmUmCmU | |
| | | | | GGCAUCG*mU*mU | |
| G028884 | 542 | UUUGUUCUA | UUUGUUCUA | mU*mU*mU*mGmU | chr6:29945218- |
| | | CCCCAGGCAG | CCCCAGGCAG | UCmUmACmCCmCA | 29945242 |
| | | UGACA | UGACAGUUG | GGCmAGUGmACAm | |
| | | | UAGCUCCCUG | GUUGmUmAmGmCU | |
| | | | AAACCGUUG | CCCmUmGmAmAmA | |
| | | | CUACAAUAA | mCmCGUUmGmCUA | |
| | | | GGCCGUCGA | mCAAU*AAGmGmC | |
| | | | AAGAUGUGC | CmGmUmCmGmAmA | |
| | | | CGCAACGCUC | mAmGmAmUGUGCm | |
| | | | UGCCUUCUG | CGmCAAmCGCUCU | |
| | | | GCAUCGUU | mGmCCmUmUmCmU | |
| | | | | GGCAUCG*mU*mU | |
| G028885 | 543 | UUUUGUUCU | UUUUGUUCU | mU*mU*mU*mUmG | chr6:29945217- |
| | | ACCCCAGGCA | ACCCCAGGCA | UUmCmUAmCCmCC | 29945241 |
| | | GUGAC | GUGACGUUG | AGGmCAGUmGACm | |
| | | | UAGCUCCCUG | GUUGmUmAmGmCU | |
| | | | AAACCGUUG | CCCmUmGmAmAmA | |
| | | | CUACAAUAA | mCmCGUUmGmCUA | |
| | | | GGCCGUCGA | mCAAU*AAGmGmC | |
| | | | AAGAUGUGC | CmGmUmCmGmAmA | |
| | | | CGCAACGCUC | mAmGmAmUGUGCm | |
| | | | UGCCUUCUG | CGmCAAmCGCUCU | |
| | | | GCAUCGUU | mGmCCmUmUmCmU | |
| | | | | GGCAUCG*mU*mU | |
| G028886 | 544 | AGCGACCACA | AGCGACCACA | mA*mG*mC*mGmAC | chr6:29944558- |
| | | GCUCCAGUG | GCUCCAGUG | CmAmCAmGCmUCC | 29944582 |
| | | AUCAC | AUCACGUUG | AGmUGAUmCACmG | |
| | | | UAGCUCCCUG | UUGmUmAmGmCUC | |
| | | | AAACCGUUG | CCmUmGmAmAmAm | |
| | | | CUACAAUAA | CmCGUUmGmCUAm | |
| | | | GGCCGUCGA | CAAU*AAGmGmCC | |
| | | | AAGAUGUGC | mGmUmCmGmAmA | |
| | | | CGCAACGCUC | mAmGmAmUGUGCm | |
| | | | UGCCUUCUG | CGmCAAmCGCUCU | |
| | | | GCAUCGUU | mGmCCmUmUmCmU | |
| | | | | GGCAUCG*mU*mU | |
| G028887 | 545 | GAGCUCCGU | GAGCUCCGU | mG*mA*mG*mCmUC | chr6:29944234- |
| | | GUCCUGGGU | GUCCUGGGU | CmGmUGmUCmCUG | 29944258 |
| | | CUGGUC | CUGGUCGUU | GGmUCUGmGUCmG | |
| | | | GUAGCUCCCU | UUGmUmAmGmCUC | |
| | | | GAAACCGUU | CCmUmGmAmAmAm | |
| | | | GCUACAAUA | CmCGUUmGmCUAm | |
| | | | AGGCCGUCG | CAAU*AAGmGmCC | |
| | | | AAAGAUGUG | mGmUmCmGmAmA | |
| | | | CCGCAACGCU | mAmGmAmUGUGCm | |
| | | | CUGCCUUCUG | CGmCAAmCGCUCU | |
| | | | GCAUCGUU | mGmCCmUmUmCmU | |
| | | | | GGCAUCG*mU*mU | |
| G028888 | 546 | UCCACGAGCU | UCCACGAGCU | mUmC*mC*mAmCG | chr6:29944239- |
| | | CCGUGUCCUG | CCGUGUCCUG | AmGmCUmCCmGUG | 29944263 |
| | | GGUC | GGUCGUUGU | UCmCUGGmGUCmG | |
| | | | AGCUCCCUGA | UUGmUmAmGmCUC | |
| | | | AACCGUUGC | CCmUmGmAmAmAm | |
| | | | UACAAUAAG | CmCGUUmGmCUAm | |
| | | | GCCGUCGAA | CAAU*AAGmGmCC | |
| | | | AGAUGUGCC | mGmUmCmGmAmA | |
| | | | GCAACGCUCU | mAmGmAmUGUGCm | |
| | | | GCCUUCUGGC | CGmCAAmCGCUCU | |
| | | | AUCGUU | mGmCCmUmUmCmU | |
| | | | | GGCAUCG*mU*mU | |
| G028889 | 547 | ACGAGCUCCG | ACGAGCUCCG | mA*mC*mG*mAmGC | chr6:29944236- |
| | | UGUCCUGGG | UGUCCUGGG | UmCmCGmUGmUCC | 29944260 |
| | | UCUGG | UCUGGGUUG | UGmGGUCmUGGmG | |
| | | | UAGCUCCCUG | UUGmUmAmGmCUC | |
| | | | AAACCGUUG | CCmUmGmAmAmAm | |
| | | | CUACAAUAA | CmCGUUmGmCUAm | |
| | | | GGCCGUCGA | CAAU*AAGmGmCC | |
| | | | AAGAUGUGC | mGmUmCmGmAmA | |
| | | | CGCAACGCUC | mAmGmAmUGUGCm | |
| | | | UGCCUUCUG | CGmCAAmCGCUCU | |
| | | | GCAUCGUU | mGmCCmUmUmCmU | |
| | | | | GGCAUCG*mU*mU | |
| G028890 | 548 | CGAGCUCCGU | CGAGCUCCGU | mC*mG*mA*mGmCU | chr6:29944235- |
| | | GUCCUGGGU | GUCCUGGGU | CmCmGUmGUmCCU | 29944259 |
| | | CUGGU | CUGGUGUUG | GGmGUCUmGGUmG | |
| | | | UAGCUCCCUG | UUGmUmAmGmCUC | |
| | | | AAACCGUUG | CCmUmGmAmAmAm | |
| | | | CUACAAUAA | CmCGUUmGmCUAm | |
| | | | GGCCGUCGA | CAAU*AAGmGmCC | |
| | | | AAGAUGUGC | mGmUmCmGmAmA | |
| | | | CGCAACGCUC | mAmGmAmUGUGCm | |
| | | | UGCCUUCUG | CGmCAAmCGCUCU | |
| | | | GCAUCGUU | mGmCCmUmUmCmU | |
| | | | | GGCAUCG*mU*mU | |
| G028891 | 549 | GCAGGCCUG | GCAGGCCUG | mG*mC*mA*mGmGC | chr6:29944251- |
| | | GUCUCCACGA | GUCUCCACGA | CmUmGGmUCmUCC | 29944275 |
| | | GCUCC | GCUCCGUUG | ACmGAGCmUCCmG | |
| | | | UAGCUCCCUG | UUGmUmAmGmCUC | |
| | | | AAACCGUUG | CCmUmGmAmAmAm | |
| | | | CUACAAUAA | CmCGUUmGmCUAm | |
| | | | GGCCGUCGA | CAAU*AAGmGmCC | |
| | | | AAGAUGUGC | mGmUmCmGmAmA | |
| | | | CGCAACGCUC | mAmGmAmUGUGCm | |
| | | | UGCCUUCUG | CGmCAAmCGCUCU | |
| | | | GCAUCGUU | mGmCCmUmUmCmU | |
| | | | | GGCAUCG*mU*mU | |
| G028892 | 550 | UCCCCUGCAG | UCCCCUGCAG | mU*mC*mC*mCmCU | chr6:29944257- |
| | | GCCUGGUCUC | GCCUGGUCUC | GmCmAGmGCmCUG | 29944281 |
| | | CACG | CACGGUUGU | GUmCUCCmACGmG | |
| | | | AGCUCCCUGA | UUGmUmAmGmCUC | |
| | | | AACCGUUGC | CCmUmGmAmAmAm | |
| | | | UACAAUAAG | CmCGUUmGmCUAm | |
| | | | GCCGUCGAA | CAAU*AAGmGmCC | |
| | | | AGAUGUGCC | mGmUmCmGmAmA | |
| | | | GCAACGCUCU | mAmGmAmUGUGCm | |
| | | | GCCUUCUGGC | CGmCAAmCGCUCU | |
| | | | AUCGUU | mGmCCmUmUmCmU | |
| | | | | GGCAUCG*mU*mU | |
| G028893 | 551 | AUCCGUGUCC | AUCCGUGUCC | mA*mU*mC*mCmGU | chr6:29942784- |
| | | CGGCCCGGCC | CGGCCCGGCC | GmUmCCmCGmGCC | 29942808 |
| | | GCGG | GCGGGUUGU | CGmGCCGmCGGmG | |
| | | | AGCUCCCUGA | UUGmUmAmGmCUC | |
| | | | AACCGUUGC | CCmUmGmAmAmAm | |
| | | | UACAAUAAG | CmCGUUmGmCUAm | |
| | | | GCCGUCGAA | CAAU*AAGmGmCC | |
| | | | AGAUGUGCC | mGmUmCmGmAmA | |
| | | | GCAACGCUCU | mAmGmAmUGUGCm | |
| | | | GCCUUCUGGC | CGmCAAmCGCUCU | |
| | | | AUCGUU | mGmCCmUmUmCmU | |
| | | | | GGCAUCG*mU*mU | |
| G028894 | 552 | CCUUCCCGUU | CCUUCCCGUU | mC*mC*mU*mUmCC | chr6:29943495- |
| | | CUCCAGGUA | CUCCAGGUA | CmGmUUmCUmCCA | 29943519 |
| | | UCUGC | UCUGCGUUG | GGmUAUCmUGCmG | |
| | | | UAGCUCCCUG | UUGmUmAmGmCUC | |
| | | | AAACCGUUG | CCmUmGmAmAmAm | |
| | | | CUACAAUAA | CmCGUUmGmCUAm | |
| | | | GGCCGUCGA | CAAU*AAGmGmCC | |
| | | | AAGAUGUGC | mGmUmCmGmAmA | |
| | | | CGCAACGCUC | mAmGmAmUGUGCm | |
| | | | UGCCUUCUG | CGmCAAmCGCUCU | |
| | | | GCAUCGUU | mGmCCmUmUmCmU | |
| | | | | GGCAUCG*mU*mU | |
| G028895 | 553 | CCGUUCUCCA | CCGUUCUCCA | mC*mC*mG*mUmUC | chr6:29943490- |
| | | GGUAUCUGC | GGUAUCUGC | UmCmCAmGGmUAU | 29943514 |
| | | GGAGC | GGAGCGUUG | CUmGCGGmAGCmG | |
| | | | UAGCUCCCUG | UUGmUmAmGmCUC | |
| | | | AAACCGUUG | CCmUmGmAmAmAm | |
| | | | CUACAAUAA | CmCGUUmGmCUAm | |
| | | | GGCCGUCGA | CAAU*AAGmGmCC | |
| | | | AAGAUGUGC | mGmUmCmGmAmA | |
| | | | CGCAACGCUC | mAmGmAmUGUGCm | |
| | | | UGCCUUCUG | CGmCAAmCGCUCU | |
| | | | GCAUCGUU | mGmCCmUmUmCmU | |
| | | | | GGCAUCG*mU*mU | |
| G028896 | 554 | ACCUGCCAUG | ACCUGCCAUG | mA*mC*mC*mUmGC | chr6:29944345- |
| | | UGCAGCAUG | UGCAGCAUG | CmAmUGmUGmCAG | 29944369 |
| | | AGGGU | AGGGUGUUG | CAmUGAGmGGUmG | |
| | | | UAGCUCCCUG | UUGmUmAmGmCUC | |
| | | | AAACCGUUG | CCmUmGmAmAmAm | |
| | | | CUACAAUAA | CmCGUUmGmCUAm | |
| | | | GGCCGUCGA | CAAU*AAGmGmCC | |
| | | | AAGAUGUGC | mGmUmCmGmAmA | |
| | | | CGCAACGCUC | mAmGmAmUGUGCm | |
| | | | UGCCUUCUG | CGmCAAmCGCUCU | |
| | | | GCAUCGUU | mGmCCmUmUmCmU | |
| | | | | GGCAUCG*mU*mU | |
| G028897 | 555 | CACCUGCCAU | CACCUGCCAU | mC*mA*mC*mCmUG | chr6:29944344- |
| | | GUGCAGCAU | GUGCAGCAU | CmCmAUmGUmGCA | 29944368 |
| | | GAGGG | GAGGGGUUG | GCmAUGAmGGGmG | |
| | | | UAGCUCCCUG | UUGmUmAmGmCUC | |
| | | | AAACCGUUG | CCmUmGmAmAmAm | |
| | | | CUACAAUAA | CmCGUUmGmCUAm | |
| | | | GGCCGUCGA | CAAU*AAGmGmCC | |
| | | | AAGAUGUGC | mGmUmCmGmAmA | |
| | | | CGCAACGCUC | mAmGmAmUGUGCm | |
| | | | UGCCUUCUG | CGmCAAmCGCUCU | |
| | | | GCAUCGUU | mGmCCmUmUmCmU | |
| | | | | GGCAUCG*mU*mU | |
| G028898 | 556 | ACCUGGCAGC | ACCUGGCAGC | mA*mC*mC*mUmGG | chr6:29944219- |
| | | GGGAUGGGG | GGGAUGGGG | CmAmGCmGGmGAU | 29944243 |
| | | AGGAC | AGGACGUUG | GGmGGAGmGACmG | |
| | | | UAGCUCCCUG | UUGmUmAmGmCUC | |
| | | | AAACCGUUG | CCmUmGmAmAmAm | |
| | | | CUACAAUAA | CmCGUUmGmCUAm | |
| | | | GGCCGUCGA | CAAU*AAGmGmCC | |
| | | | AAGAUGUGC | mGmUmCmGmAmA | |
| | | | CGCAACGCUC | mAmGmAmUGUGCm | |
| | | | UGCCUUCUG | CGmCAAmCGCUCU | |
| | | | GCAUCGUU | mGmCCmUmUmCmU | |
| | | | | GGCAUCG*mU*mU | |
| G028899 | 557 | CACUGACCUG | CACUGACCUG | mC*mA*mC*mUmGA | chr6:29944214- |
| | | GCAGCGGGA | GCAGCGGGA | CmCmUGmGCmAGC | 29944238 |
| | | UGGGG | UGGGGGUUG | GGmGAUGmGGGmG | |
| | | | UAGCUCCCUG | UUGmUmAmGmCUC | |
| | | | AAACCGUUG | CCmUmGmAmAmAm | |
| | | | CUACAAUAA | CmCGUUmGmCUAm | |
| | | | GGCCGUCGA | CAAU*AAGmGmCC | |
| | | | AAGAUGUGC | mGmUmCmGmAmA | |
| | | | CGCAACGCUC | mAmGmAmUGUGCm | |
| | | | UGCCUUCUG | CGmCAAmCGCUCU | |
| | | | GCAUCGUU | mGmCCmUmUmCmU | |
| | | | | GGCAUCG*mU*mU | |
| G028900 | 558 | CCUGGCAGCG | CCUGGCAGCG | mC*mC*mU*mGmGC | chr6:29944220- |
| | | GGAUGGGGA | GGAUGGGGA | AmGmCGmGGmAUG | 29944244 |
| | | GGACC | GGACCGUUG | GGmGAGGmACCmG | |
| | | | UAGCUCCCUG | UUGmUmAmGmCUC | |
| | | | AAACCGUUG | CCmUmGmAmAmAm | |
| | | | CUACAAUAA | CmCGUUmGmCUAm | |
| | | | GGCCGUCGA | CAAU*AAGmGmCC | |
| | | | AAGAUGUGC | mGmUmCmGmAmA | |
| | | | CGCAACGCUC | mAmGmAmUGUGCm | |
| | | | UGCCUUCUG | CGmCAAmCGCUCU | |
| | | | GCAUCGUU | mGmCCmUmUmCmU | |
| | | | | GGCAUCG*mU*mU | |
| G028901 | 559 | CCAUCUCAGG | CCAUCUCAGG | mC*mC*mA*mUmCU | chr6:29944366- |
| | | GUGAGGGGC | GUGAGGGGC | CmAmGGmGUmGAG | 29944390 |
| | | UUGGG | UUGGGGUUG | GGmGCUUmGGGmG | |
| | | | UAGCUCCCUG | UUGmUmAmGmCUC | |
| | | | AAACCGUUG | CCmUmGmAmAmAm | |
| | | | CUACAAUAA | CmCGUUmGmCUAm | |
| | | | GGCCGUCGA | CAAU*AAGmGmCC | |
| | | | AAGAUGUGC | mGmUmCmGmAmA | |
| | | | CGCAACGCUC | mAmGmAmUGUGCm | |
| | | | UGCCUUCUG | CGmCAAmCGCUCU | |
| | | | GCAUCGUU | mGmCCmUmUmCmU | |
| | | | | GGCAUCG*mU*mU | |
| G028902 | 560 | UGGCCGUCA | UGGCCGUCA | mU*mG*mG*mCmCG | chr6:29942554- |
| | | UGGCGCCCCG | UGGCGCCCCG | UmCmAUmGGmCGC | 29942578 |
| | | AACCC | AACCCGUUG | CCmCGAAmCCCmG | |
| | | | UAGCUCCCUG | UUGmUmAmGmCUC | |
| | | | AAACCGUUG | CCmUmGmAmAmAm | |
| | | | CUACAAUAA | CmCGUUmGmCUAm | |
| | | | GGCCGUCGA | CAAU*AAGmGmCC | |
| | | | AAGAUGUGC | mGmUmCmGmAmA | |
| | | | CGCAACGCUC | mAmGmAmUGUGCm | |
| | | | UGCCUUCUG | CGmCAAmCGCUCU | |
| | | | GCAUCGUU | mGmCCmUmUmCmU | |
| | | | | GGCAUCG*mU*mU | |
| G028903 | 561 | AUGUCCGCCG | AUGUCCGCCG | mA*mU*mG*mUmCC | chr6:29943379- |
| | | CGGUCCAAG | CGGUCCAAG | GmCmCGmCGmGUC | 29943403 |
| | | AGCGC | AGCGCGUUG | CAmAGAGmCGCmG | |
| | | | UAGCUCCCUG | UUGmUmAmGmCUC | |
| | | | AAACCGUUG | CCmUmGmAmAmAm | |
| | | | CUACAAUAA | CmCGUUmGmCUAm | |
| | | | GGCCGUCGA | CAAU*AAGmGmCC | |
| | | | AAGAUGUGC | mGmUmCmGmAmA | |
| | | | CGCAACGCUC | mAmGmAmUGUGCm | |
| | | | UGCCUUCUG | CGmCAAmCGCUCU | |
| | | | GCAUCGUU | mGmCCmUmUmCmU | |
| | | | | GGCAUCG*mU*mU | |
| G028904 | 562 | GGUACCCGU | GGUACCCGU | mG*mG*mU*mAmCC | chr6:29943518- |
| | | GCGCUGCAGC | GCGCUGCAGC | CmGmUGmCGmCUG | 29943542 |
| | | GUCUC | GUCUCGUUG | CAmGCGUmCUCmG | |
| | | | UAGCUCCCUG | UUGmUmAmGmCUC | |
| | | | AAACCGUUG | CCmUmGmAmAmAm | |
| | | | CUACAAUAA | CmCGUUmGmCUAm | |
| | | | GGCCGUCGA | CAAU*AAGmGmCC | |
| | | | AAGAUGUGC | mGmUmCmGmAmA | |
| | | | CGCAACGCUC | mAmGmAmUGUGCm | |
| | | | UGCCUUCUG | CGmCAAmCGCUCU | |
| | | | GCAUCGUU | mGmCCmUmUmCmU | |
| | | | | GGCAUCG*mU*mU | |
| G028905 | 563 | GGGAAGGAG | GGGAAGGAG | mG*mG*mG*mAmA | chr6:29943518- |
| | | ACGCUGCAGC | ACGCUGCAGC | GGmAmGAmCGmCU | 29943542 |
| | | GCACG | GCACGGUUG | GCAmGCGCmACGm | |
| | | | UAGCUCCCUG | GUUGmUmAmGmCU | |
| | | | AAACCGUUG | CCCmUmGmAmAmA | |
| | | | CUACAAUAA | mCmCGUUmGmCUA | |
| | | | GGCCGUCGA | mCAAU*AAGmGmC | |
| | | | AAGAUGUGC | CmGmUmCmGmAmA | |
| | | | CGCAACGCUC | mAmGmAmUGUGCm | |
| | | | UGCCUUCUG | CGmCAAmCGCUCU | |
| | | | GCAUCGUU | mGmCCmUmUmCmU | |
| | | | | GGCAUCG*mU*mU | |
| G028906 | 564 | GCGGGCGCCG | GCGGGCGCCG | mG*mC*mG*mGmGC | chr6:29942895- |
| | | UGGAUAGAG | UGGAUAGAG | GmCmCGmUGmGAU | 29942919 |
| | | CAGGA | CAGGAGUUG | AGmAGCAmGGAmG | |
| | | | UAGCUCCCUG | UUGmUmAmGmCUC | |
| | | | AAACCGUUG | CCmUmGmAmAmAm | |
| | | | CUACAAUAA | CmCGUUmGmCUAm | |
| | | | GGCCGUCGA | CAAU*AAGmGmCC | |
| | | | AAGAUGUGC | mGmUmCmGmAmA | |
| | | | CGCAACGCUC | mAmGmAmUGUGCm | |
| | | | UGCCUUCUG | CGmCAAmCGCUCU | |
| | | | GCAUCGUU | mGmCCmUmUmCmU | |
| | | | | GGCAUCG*mU*mU | |
| G028907 | 565 | UCCUGCUCUA | UCCUGCUCUA | mU*mC*mC*mUmGC | chr6:29942889- |
| | | UCCACGGCGC | UCCACGGCGC | UmCmUAmUCmCAC | 29942913 |
| | | CCGC | CCGCGUUGU | GGmCGCCmCGCmG | |
| | | | AGCUCCCUGA | UUGmUmAmGmCUC | |
| | | | AACCGUUGC | CCmUmGmAmAmAm | |
| | | | UACAAUAAG | CmCGUUmGmCUAm | |
| | | | GCCGUCGAA | CAAU*AAGmGmCC | |
| | | | AGAUGUGCC | mGmUmCmGmAmA | |
| | | | GCAACGCUCU | mAmGmAmUGUGCm | |
| | | | GCCUUCUGGC | CGmCAAmCGCUCU | |
| | | | AUCGUU | mGmCCmUmUmCmU | |
| | | | | GGCAUCG*mU*mU | |
| G028908 | 566 | CCCCUGGUAC | CCCCUGGUAC | mC*mC*mC*mCmUG | chr6:29943523- |
| | | CCGUGCGCUG | CCGUGCGCUG | GmUmACmCCmGUG | 29943547 |
| | | CAGC | CAGCGUUGU | CGmCUGCmAGCmG | |
| | | | AGCUCCCUGA | UUGmUmAmGmCUC | |
| | | | AACCGUUGC | CCmUmGmAmAmAm | |
| | | | UACAAUAAG | CmCGUUmGmCUAm | |
| | | | GCCGUCGAA | CAAU*AAGmGmCC | |
| | | | AGAUGUGCC | mGmUmCmGmAmA | |
| | | | GCAACGCUCU | mAmGmAmUGUGCm | |
| | | | GCCUUCUGGC | CGmCAAmCGCUCU | |
| | | | AUCGUU | mGmCCmUmUmCmU | |
| | | | | GGCAUCG*mU*mU | |
| G028909 | 567 | UGGUACCCG | UGGUACCCG | mU*mG*mG*mUmAC | chr6:29943519- |
| | | UGCGCUGCA | UGCGCUGCA | CmCmGUmGCmGCU | |
| | | GCGUCU | GCGUCUGUU | GCmAGCGmUCUmG | |
| | | | GUAGCUCCCU | UUGmUmAmGmCUC | |
| | | | GAAACCGUU | CCmUmGmAmAmAm | |
| | | | GCUACAAUA | CmCGUUmGmCUAm | |
| | | | AGGCCGUCG | CAAU*AAGmGmCC | 29943543 |
| | | | AAAGAUGUG | mGmUmCmGmAmA | |
| | | | CCGCAACGCU | mAmGmAmUGUGCm | |
| | | | CUGCCUUCUG | CGmCAAmCGCUCU | |
| | | | GCAUCGUU | mGmCCmUmUmCmU | |
| | | | | GGCAUCG*mU*mU | |
| G028910 | 568 | CAUCUCAGG | CAUCUCAGG | mC*mA*mU*mCmUC | chr6:29944365- |
| | | GUGAGGGGC | GUGAGGGGC | AmGmGGmUGmAGG | 29944389 |
| | | UUGGGC | UUGGGCGUU | GGmCUUGmGGCmG | |
| | | | GUAGCUCCCU | UUGmUmAmGmCUC | |
| | | | GAAACCGUU | CCmUmGmAmAmAm | |
| | | | GCUACAAUA | CmCGUUmGmCUAm | |
| | | | AGGCCGUCG | CAAU*AAGmGmCC | |
| | | | AAAGAUGUG | mGmUmCmGmAmA | |
| | | | CCGCAACGCU | mAmGmAmUGUGCm | |
| | | | CUGCCUUCUG | CGmCAAmCGCUCU | |
| | | | GCAUCGUU | mGmCCmUmUmCmU | |
| | | | | GGCAUCG*mU*mU | |
| G028911 | 569 | ACGCAGUUC | ACGCAGUUC | mA*mC*mG*mCmAG | chr6:29942845- |
| | | GUGCGGUUC | GUGCGGUUC | UmUmCGmUGmCGG | 29942869 |
| | | GACAGC | GACAGCGUU | UUmCGACmAGCmG | |
| | | | GUAGCUCCCU | UUGmUmAmGmCUC | |
| | | | GAAACCGUU | CCmUmGmAmAmAm | |
| | | | GCUACAAUA | CmCGUUmGmCUAm | |
| | | | AGGCCGUCG | CAAU*AAGmGmCC | |
| | | | AAAGAUGUG | mGmUmCmGmAmA | |
| | | | CCGCAACGCU | mAmGmAmUGUGCm | |
| | | | CUGCCUUCUG | CGmCAAmCGCUCU | |
| | | | GCAUCGUU | mGmCCmUmUmCmU | |
| | | | | GGCAUCG*mU*mU | |
| G028912 | 570 | CGCCCAGGUC | CGCCCAGGUC | mC*mG*mC*mCmCA | chr6:29942595- |
| | | UGGGUCAGG | UGGGUCAGG | GmGmUCmUGmGGU | 29942619 |
| | | GCCAG | GCCAGGUUG | CAmGGGCmCAGmG | |
| | | | UAGCUCCCUG | UUGmUmAmGmCUC | |
| | | | AAACCGUUG | CCmUmGmAmAmAm | |
| | | | CUACAAUAA | CmCGUUmGmCUAm | |
| | | | GGCCGUCGA | CAAU*AAGmGmCC | |
| | | | AAGAUGUGC | mGmUmCmGmAmA | |
| | | | CGCAACGCUC | mAmGmAmUGUGCm | |
| | | | UGCCUUCUG | CGmCAAmCGCUCU | |
| | | | GCAUCGUU | mGmCCmUmUmCmU | |
| | | | | GGCAUCG*mU*mU | |
| G028913 | 571 | CACUCACCCG | CACUCACCCG | mC*mA*mC*mUmCA | chr6:29942609- |
| | | CCCAGGUCUG | CCCAGGUCUG | CmCmCGmCCmCAG | 29942633 |
| | | GGUC | GGUCGUUGU | GUmCUGGmGUCmG | |
| | | | AGCUCCCUGA | UUGmUmAmGmCUC | |
| | | | AACCGUUGC | CCmUmGmAmAmAm | |
| | | | UACAAUAAG | CmCGUUmGmCUAm | |
| | | | GCCGUCGAA | CAAU*AAGmGmCC | |
| | | | AGAUGUGCC | mGmUmCmGmAmA | |
| | | | GCAACGCUCU | mAmGmAmUGUGCm | |
| | | | GCCUUCUGGC | CGmCAAmCGCUCU | |
| | | | AUCGUU | mGmCCmUmUmCmU | |
| | | | | GGCAUCG*mU*mU | |
| G028914 | 572 | CCGCCCAGGU | CCGCCCAGGU | mC*mC*mG*mCmCC | chr6:29942596- |
| | | CUGGGUCAG | CUGGGUCAG | AmGmGUmCUmGGG | 29942620 |
| | | GGCCA | GGCCAGUUG | UCmAGGGmCCAmG | |
| | | | UAGCUCCCUG | UUGmUmAmGmCUC | |
| | | | AAACCGUUG | CCmUmGmAmAmAm | |
| | | | CUACAAUAA | CmCGUUmGmCUAm | |
| | | | GGCCGUCGA | CAAU*AAGmGmCC | |
| | | | AAGAUGUGC | mGmUmCmGmAmA | |
| | | | CGCAACGCUC | mAmGmAmUGUGCm | |
| | | | UGCCUUCUG | CGmCAAmCGCUCU | |
| | | | GCAUCGUU | mGmCCmUmUmCmU | |
| | | | | GGCAUCG*mU*mU | |
| G028915 | 573 | CCCGCCCAGG | CCCGCCCAGG | mC*mC*mC*mGmCC | chr6:29942597- |
| | | UCUGGGUCA | UCUGGGUCA | CmAmGGmUCmUGG | 29942621 |
| | | GGGCC | GGGCCGUUG | GUmCAGGmGCCmG | |
| | | | UAGCUCCCUG | UUGmUmAmGmCUC | |
| | | | AAACCGUUG | CCmUmGmAmAmAm | |
| | | | CUACAAUAA | CmCGUUmGmCUAm | |
| | | | GGCCGUCGA | CAAU*AAGmGmCC | |
| | | | AAGAUGUGC | mGmUmCmGmAmA | |
| | | | CGCAACGCUC | mAmGmAmUGUGCm | |
| | | | UGCCUUCUG | CGmCAAmCGCUCU | |
| | | | GCAUCGUU | mGmCCmUmUmCmU | |
| | | | | GGCAUCG*mU*mU | |
| G028916 | 574 | CAGCGACGCC | CAGCGACGCC | mC*mA*mG*mCmGA | chr6:29942865- |
| | | GCGAGCCAG | GCGAGCCAG | CmGmCCmGCmGAG | 29942889 |
| | | AGGAU | AGGAUGUUG | CCmAGAGmGAUmG | |
| | | | UAGCUCCCUG | UUGmUmAmGmCUC | |
| | | | AAACCGUUG | CCmUmGmAmAmAm | |
| | | | CUACAAUAA | CmCGUUmGmCUAm | |
| | | | GGCCGUCGA | CAAU*AAGmGmCC | |
| | | | AAGAUGUGC | mGmUmCmGmAmA | |
| | | | CGCAACGCUC | mAmGmAmUGUGCm | |
| | | | UGCCUUCUG | CGmCAAmCGCUCU | |
| | | | GCAUCGUU | mGmCCmUmUmCmU | |
| | | | | GGCAUCG*mU*mU | |
| G028917 | 575 | CGCGAGCCAG | CGCGAGCCAG | mC*mG*mC*mGmAG | chr6:29942874- |
| | | AGGAUGGAG | AGGAUGGAG | CmCmAGmAGmGAU | 29942898 |
| | | CCGCG | CCGCGGUUG | GGmAGCCmGCGmG | |
| | | | UAGCUCCCUG | UUGmUmAmGmCUC | |
| | | | AAACCGUUG | CCmUmGmAmAmAm | |
| | | | CUACAAUAA | CmCGUUmGmCUAm | |
| | | | GGCCGUCGA | CAAU*AAGmGmCC | |
| | | | AAGAUGUGC | mGmUmCmGmAmA | |
| | | | CGCAACGCUC | mAmGmAmUGUGCm | |
| | | | UGCCUUCUG | CGmCAAmCGCUCU | |
| | | | GCAUCGUU | mGmCCmUmUmCmU | |
| | | | | GGCAUCG*mU*mU | |
| G028918 | 576 | GCUCUAUCCA | GCUCUAUCCA | mG*mC*mU*mCmUA | chr6:29942891- |
| | | CGGCGCCCGC | CGGCGCCCGC | UmCmCAmCGmGCG | 29942915 |
| | | GGCU | GGCUGUUGU | CCmCGCGmGCUmG | |
| | | | AGCUCCCUGA | UUGmUmAmGmCUC | |
| | | | AACCGUUGC | CCmUmGmAmAmAm | |
| | | | UACAAUAAG | CmCGUUmGmCUAm | |
| | | | GCCGUCGAA | CAAU*AAGmGmCC | |
| | | | AGAUGUGCC | mGmUmCmGmAmA | |
| | | | GCAACGCUCU | mAmGmAmUGUGCm | |
| | | | GCCUUCUGGC | CGmCAAmCGCUCU | |
| | | | AUCGUU | mGmCCmUmUmCmU | |
| | | | | GGCAUCG*mU*mU | |
| G028919 | 577 | CACAUCAGA | CACAUCAGA | mC*mA*mC*mAmUC | chr6:29945232- |
| | | GCCCUGGGCA | GCCCUGGGCA | AmGmAGmCCmCUG | 29945256 |
| | | CUGUC | CUGUCGUUG | GGmCACUmGUCmG | |
| | | | UAGCUCCCUG | UUGmUmAmGmCUC | |
| | | | AAACCGUUG | CCmUmGmAmAmAm | |
| | | | CUACAAUAA | CmCGUUmGmCUAm | |
| | | | GGCCGUCGA | CAAU*AAGmGmCC | |
| | | | AAGAUGUGC | mGmUmCmGmAmA | |
| | | | CGCAACGCUC | mAmGmAmUGUGCm | |
| | | | UGCCUUCUG | CGmCAAmCGCUCU | |
| | | | GCAUCGUU | mGmCCmUmUmCmU | |
| | | | | GGCAUCG*mU*mU | |
| G028920 | 578 | CAGACCCAGG | CAGACCCAGG | mC*mA*mG*mAmCC | chr6:29944243- |
| | | ACACGGAGC | ACACGGAGC | CmAmGGmACmACG | 29944267 |
| | | UCGUG | UCGUGGUUG | GAmGCUCmGUGmG | |
| | | | UAGCUCCCUG | UUGmUmAmGmCUC | |
| | | | AAACCGUUG | CCmUmGmAmAmAm | |
| | | | CUACAAUAA | CmCGUUmGmCUAm | |
| | | | GGCCGUCGA | CAAU*AAGmGmCC | |
| | | | AAGAUGUGC | mGmUmCmGmAmA | |
| | | | CGCAACGCUC | mAmGmAmUGUGCm | |
| | | | UGCCUUCUG | CGmCAAmCGCUCU | |
| | | | GCAUCGUU | mGmCCmUmUmCmU | |
| | | | | GGCAUCG*mU*mU | |
| G028921 | 579 | CCAGGACACG | CCAGGACACG | mC*mC*mA*mGmGA | chr6:29944248- |
| | | GAGCUCGUG | GAGCUCGUG | CmAmCGmGAmGCU | 29944272 |
| | | GAGAC | GAGACGUUG | CGmUGGAmGACmG | |
| | | | UAGCUCCCUG | UUGmUmAmGmCUC | |
| | | | AAACCGUUG | CCmUmGmAmAmAm | |
| | | | CUACAAUAA | CmCGUUmGmCUAm | |
| | | | GGCCGUCGA | CAAU*AAGmGmCC | |
| | | | AAGAUGUGC | mGmUmCmGmAmA | |
| | | | CGCAACGCUC | mAmGmAmUGUGCm | |
| | | | UGCCUUCUG | CGmCAAmCGCUCU | |
| | | | GCAUCGUU | mGmCCmUmUmCmU | |
| | | | | GGCAUCG*mU*mU | |
| G028922 | 580 | CUCUGGGAA | CUCUGGGAA | mC*mU*mC*mUmGG | chr6:29944471- |
| | | AAGAGGGGA | AAGAGGGGA | GmAmAAmAGmAGG | 29944495 |
| | | AGGUGA | AGGUGAGUU | GGmAAGGmUGAmG | |
| | | | GUAGCUCCCU | UUGmUmAmGmCUC | |
| | | | GAAACCGUU | CCmUmGmAmAmAm | |
| | | | GCUACAAUA | CmCGUUmGmCUAm | |
| | | | AGGCCGUCG | CAAU*AAGmGmCC | |
| | | | AAAGAUGUG | mGmUmCmGmAmA | |
| | | | CCGCAACGCU | mAmGmAmUGUGCm | |
| | | | CUGCCUUCUG | CGmCAAmCGCUCU | |
| | | | GCAUCGUU | mGmCCmUmUmCmU | |
| | | | | GGCAUCG*mU*mU | |
| G028923 | 581 | UCUGGGAAA | UCUGGGAAA | mU*mC*mU*mGmGG | chr6:29944470- |
| | | AGAGGGGAA | AGAGGGGAA | AmAmAAmGAmGGG | 29944494 |
| | | GGUGAG | GGUGAGGUU | GAmAGGUmGAGmG | |
| | | | GUAGCUCCCU | UUGmUmAmGmCUC | |
| | | | GAAACCGUU | CCmUmGmAmAmAm | |
| | | | GCUACAAUA | CmCGUUmGmCUAm | |
| | | | AGGCCGUCG | CAAU*AAGmGmCC | |
| | | | AAAGAUGUG | mGmUmCmGmAmA | |
| | | | CCGCAACGCU | mAmGmAmUGUGCm | |
| | | | CUGCCUUCUG | CGmCAAmCGCUCU | |
| | | | GCAUCGUU | mGmCCmUmUmCmU | |
| | | | | GGCAUCG*mU*mU | |
| G028924 | 582 | AGACGCUGC | AGACGCUGC | mA*mG*mA*mCmGC | chr6:29943525- |
| | | AGCGCACGG | AGCGCACGG | UmGmCAmGCmGCA | 29943549 |
| | | GUACCA | GUACCAGUU | CGmGGUAmCCAmG | |
| | | | GUAGCUCCCU | UUGmUmAmGmCUC | |
| | | | GAAACCGUU | CCmUmGmAmAmAm | |
| | | | GCUACAAUA | CmCGUUmGmCUAm | |
| | | | AGGCCGUCG | CAAU*AAGmGmCC | |
| | | | AAAGAUGUG | mGmUmCmGmAmA | |
| | | | CCGCAACGCU | mAmGmAmUGUGCm | |
| | | | CUGCCUUCUG | CGmCAAmCGCUCU | |
| | | | GCAUCGUU | mGmCCmUmUmCmU | |
| | | | | GGCAUCG*mU*mU | |
| G028925 | 583 | UCCUUUUCU | UCCUUUUCU | mU*mC*mC*mUmUU | Unavailable. |
| | | AUCUGUGGG | AUCUGUGGG | UmCmUAmUCmUGU | Imperfect |
| | | AAGAAA | AAGAAAGUU | GGmGAAGmAAAmG | alignment to |
| | | | GUAGCUCCCU | UUGmUmAmGmCUC | human genome. |
| | | | GAAACCGUU | CCmUmGmAmAmAm | |
| | | | GCUACAAUA | CmCGUUmGmCUAm | |
| | | | AGGCCGUCG | CAAU*AAGmGmCC | |
| | | | AAAGAUGUG | mGmUmCmGmAmA | |
| | | | CCGCAACGCU | mAmGmAmUGUGCm | |
| | | | CUGCCUUCUG | CGmCAAmCGCUCU | |
| | | | GCAUCGUU | mGmCCmUmUmCmU | |
| | | | | GGCAUCG*mU*mU | |
| G028926 | 584 | CACUGCCUGG | CACUGCCUGG | mC*mA*mC*mUmGC | chr6:29945209- |
| | | GGUAGAACA | GGUAGAACA | CmUmGGmGGmUAG | 29945233 |
| | | AAAAC | AAAACGUUG | AAmCAAAmAACmG | |
| | | | UAGCUCCCUG | UUGmUmAmGmCUC | |
| | | | AAACCGUUG | CCmUmGmAmAmAm | |
| | | | CUACAAUAA | CmCGUUmGmCUAm | |
| | | | GGCCGUCGA | CAAU*AAGmGmCC | |
| | | | AAGAUGUGC | mGmUmCmGmAmA | |
| | | | CGCAACGCUC | mAmGmAmUGUGCm | |
| | | | UGCCUUCUG | CGmCAAmCGCUCU | |
| | | | GCAUCGUU | mGmCCmUmUmCmU | |
| | | | | GGCAUCG*mU*mU | |
| G028927 | 585 | ACAACCAGA | ACAACCAGA | mA*mC*mA*mAmCC | chr6:29943008- |
| | | GCGAGGCCG | GCGAGGCCG | AmGmAGmCGmAGG | 29943032 |
| | | GUGAGU | GUGAGUGUU | CCmGGUGmAGUmG | |
| | | | GUAGCUCCCU | UUGmUmAmGmCUC | |
| | | | GAAACCGUU | CCmUmGmAmAmAm | |
| | | | GCUACAAUA | CmCGUUmGmCUAm | |
| | | | AGGCCGUCG | CAAU*AAGmGmCC | |
| | | | AAAGAUGUG | mGmUmCmGmAmA | |
| | | | CCGCAACGCU | mAmGmAmUGUGCm | |
| | | | CUGCCUUCUG | CGmCAAmCGCUCU | |
| | | | GCAUCGUU | mGmCCmUmUmCmU | |
| | | | | GGCAUCG*mU*mU | |
| G028928 | 586 | CUACAACCAG | CUACAACCAG | mC*mU*mA*mCmAA | chr6:29943006- |
| | | AGCGAGGCC | AGCGAGGCC | CmCmAGmAGmCGA | 29943030 |
| | | GGUGA | GGUGAGUUG | GGmCCGGmUGAmG | |
| | | | UAGCUCCCUG | UUGmUmAmGmCUC | |
| | | | AAACCGUUG | CCmUmGmAmAmAm | |
| | | | CUACAAUAA | CmCGUUmGmCUAm | |
| | | | GGCCGUCGA | CAAU*AAGmGmCC | |
| | | | AAGAUGUGC | mGmUmCmGmAmA | |
| | | | CGCAACGCUC | mAmGmAmUGUGCm | |
| | | | UGCCUUCUG | CGmCAAmCGCUCU | |
| | | | GCAUCGUU | mGmCCmUmUmCmU | |
| | | | | GGCAUCG*mU*mU | |
| G028929 | 587 | UACAACCAG | UACAACCAG | mU*mA*mC*mAmAC | chr6:29943007- |
| | | AGCGAGGCC | AGCGAGGCC | CmAmGAmGCmGAG | 29943031 |
| | | GGUGAG | GGUGAGGUU | GCmCGGUmGAGmG | |
| | | | GUAGCUCCCU | UUGmUmAmGmCUC | |
| | | | GAAACCGUU | CCmUmGmAmAmAm | |
| | | | GCUACAAUA | CmCGUUmGmCUAm | |
| | | | AGGCCGUCG | CAAU*AAGmGmCC | |
| | | | AAAGAUGUG | mGmUmCmGmAmA | |
| | | | CCGCAACGCU | mAmGmAmUGUGCm | |
| | | | CUGCCUUCUG | CGmCAAmCGCUCU | |
| | | | GCAUCGUU | mGmCCmUmUmCmU | |
| | | | | GGCAUCG*mU*mU | |
| G028930 | 588 | CCAGAGCGA | CCAGAGCGA | mC*mC*mA*mGmAG | chr6:29943012- |
| | | GGCCGGUGA | GGCCGGUGA | CmGmAGmGCmCGG | 29943036 |
| | | GUGACC | GUGACCGUU | UGmAGUGmACCmG | |
| | | | GUAGCUCCCU | UUGmUmAmGmCUC | |
| | | | GAAACCGUU | CCmUmGmAmAmAm | |
| | | | GCUACAAUA | CmCGUUmGmCUAm | |
| | | | AGGCCGUCG | CAAU*AAGmGmCC | |
| | | | AAAGAUGUG | mGmUmCmGmAmA | |
| | | | CCGCAACGCU | mAmGmAmUGUGCm | |
| | | | CUGCCUUCUG | CGmCAAmCGCUCU | |
| | | | GCAUCGUU | mGmCCmUmUmCmU | |
| | | | | GGCAUCG*mU*mU | |
| G028933 | 589 | CCAUCCCGCU | CCAUCCCGCU | mC*mC*mA*mUmCC | chr6:29944206- |
| | | GCCAGGUCA | GCCAGGUCA | CmGmCUmGCmCAG | 29944230 |
| | | GUGUG | GUGUGGUUG | GUmCAGUmGUGmG | |
| | | | UAGCUCCCUG | UUGmUmAmGmCUC | |
| | | | AAACCGUUG | CCmUmGmAmAmAm | |
| | | | CUACAAUAA | CmCGUUmGmCUAm | |
| | | | GGCCGUCGA | CAAU*AAGmGmCC | |
| | | | AAGAUGUGC | mGmUmCmGmAmA | |
| | | | CGCAACGCUC | mAmGmAmUGUGCm | |
| | | | UGCCUUCUG | CGmCAAmCGCUCU | |
| | | | GCAUCGUU | mGmCCmUmUmCmU | |
| | | | | GGCAUCG*mU*mU | |
| G028934 | 590 | GUAUCUGCG | GUAUCUGCG | mG*mU*mA*mUmCU | chr6:29943479- |
| | | GAGCCACUCC | GAGCCACUCC | GmCmGGmAGmCCA | 29943503 |
| | | ACGCA | ACGCAGUUG | CUmCCACmGCAmG | |
| | | | UAGCUCCCUG | UUGmUmAmGmCUC | |
| | | | AAACCGUUG | CCmUmGmAmAmAm | |
| | | | CUACAAUAA | CmCGUUmGmCUAm | |
| | | | GGCCGUCGA | CAAU*AAGmGmCC | |
| | | | AAGAUGUGC | mGmUmCmGmAmA | |
| | | | CGCAACGCUC | mAmGmAmUGUGCm | |
| | | | UGCCUUCUG | CGmCAAmCGCUCU | |
| | | | GCAUCGUU | mGmCCmUmUmCmU | |
| | | | | GGCAUCG*mU*mU | |

[0625] In some embodiments, the HLA-A guide RNA comprises a guide sequence selected from any one of SEQ ID NOs: 301-590. In some embodiments, the HLA-A guide RNA comprises a guide sequence that is at least 17, 18, 19, 20, 21, 22, 23, or 24 contiguous nucleotides of a sequence selected from SEQ ID NOs: 301-590. In some embodiments, the HLA-A guide RNA comprises a guide sequence that is at least 95%, 90%, 85%, 80%, 75%, or 70% identical to a sequence selected from SEQ ID NOs: 301-590. In some embodiments, the HLA-A guide RNA comprises a guide sequence that is at least 95% identical to a sequence selected from SEQ ID NOs: 301-590.

[0626] In some embodiments, the HLA-A gRNA comprises a guide sequence selected from any one of SEQ ID NOs: 301-395. In some embodiments, the HLA-A gRNA comprises a guide sequence selected from any one of SEQ ID NOs: 307, 313-318, 322, 326, 331, 333, 337-341, 343, 345, 347, 357, 359, 362, 366, 387. In some embodiments, the HLA-A gRNA comprises a guide sequence selected from any one of SEQ ID NOs: 313-318, 326, 337-339, 341, 343, 345, 362. In some embodiments, the HLA-A gRNA comprises a guide sequence selected from any one of SEQ ID NOs: 313-318. In some embodiments, the HLA-A gRNA comprises a guide sequence selected from any one of SEQ ID NOs: 313-317. n some embodiments, the HLA-A gRNA comprises a guide sequence selected from any one of SEQ ID NOs: 337-339, 341, 343, and 345. In some embodiments, the HLA-A gRNA comprises a guide sequence selected from any one of SEQ ID NOs: 337-339. In some embodiments, the HLA-A gRNA comprises a guide sequence selected from any one of SEQ ID NOs: 523, 565, 571, 576, 580, 581.

[0627] In some embodiments, the HLA-A guide RNA comprises a guide sequence that comprises at least 10 contiguous nucleotides ±10 nucleotides of a genomic coordinate listed in Tables 4-7. As used herein, at least 10 contiguous nucleotides ±10 nucleotides of a genomic coordinate means, for example, at least 10 contiguous nucleotides within the genomic coordinates wherein the genomic coordinates include 10 nucleotides in the 5′ direction and 10 nucleotides in the 3′ direction from the ranges listed in Tables 4-7. For example, an HLA-A guide RNA may comprise 10 contiguous nucleotides within the genomic coordinates chr6:29942864 to chr6: 29942903 or chr6:29943528 to chr6:29943609, including the boundary nucleotides of these ranges. In some embodiments, the HLA-A guide RNA comprises a guide sequence that is at least 17, 18, 19, or 20 contiguous nucleotides of a sequence that comprises 10 contiguous nucleotides ±10 nucleotides of a genomic coordinate listed in Tables 4, 5B and 6, or a guide sequence that is complementary to at least 17, 18, 19, 20, 21, 22, 23, or 24 contiguous nucleotides of a sequence that comprises 10 contiguous nucleotides ±10 nucleotides of a genomic coordinate listed in Tables 5A and 7. In some embodiments, the HLA-A guide RNA comprises a guide sequence that is at least 95%, 90%, or 85% identical to a sequence selected from a sequence that is 17, 18, 19, or 20 contiguous nucleotides of a sequence that comprises 10 contiguous nucleotides ±10 nucleotides of a genomic coordinate listed in Tables 4, 5B and 6, or a guide sequence that is complementary to at least 17, 18, 19, 20, 21, 22, 23, or 24 contiguous nucleotides of a sequence that comprises 10 contiguous nucleotides ±10 nucleotides of a genomic coordinate listed in Tables 5A and 7.

[0628] In some embodiments, the guide RNA comprises a guide sequence that comprises at least 15 contiguous nucleotides ±10 nucleotides of a genomic coordinate listed in Tables 4-7. In some embodiments, the HLA-A guide RNA comprises a guide sequence that comprises at least 20 contiguous nucleotides ±10 nucleotides of a genomic coordinate listed in Tables 4-7.

[0629] In some embodiments, the HLA-A guide RNA comprises SEQ ID NO: 301. In some embodiments, the HLA-A guide RNA comprises SEQ ID NO: 302. In some embodiments, the HLA-A guide RNA comprises SEQ ID NO: 303. In some embodiments, the HLA-A guide RNA comprises SEQ ID NO: 304. In some embodiments, the HLA-A guide RNA comprises SEQ ID NO: 305. In some embodiments, the HLA-A guide RNA comprises SEQ ID NO: 306. In some embodiments, the HLA-A guide RNA comprises SEQ ID NO: 307. In some embodiments, the HLA-A guide RNA comprises SEQ ID NO: 308. In some embodiments, the HLA-A guide RNA comprises SEQ ID NO: 309. In some embodiments, the HLA-A guide RNA comprises SEQ ID NO: 310. In some embodiments, the HLA-A guide RNA comprises SEQ ID NO: 311. In some embodiments, the HLA-A guide RNA comprises SEQ ID NO: 312. In some embodiments, the HLA-A guide RNA comprises SEQ ID NO: 313. In some embodiments, the HLA-A guide RNA comprises SEQ ID NO: 314. In some embodiments, the HLA-A guide RNA comprises SEQ ID NO: 315. In some embodiments, the HLA-A guide RNA comprises SEQ ID NO: 316. In some embodiments, the HLA-A guide RNA comprises SEQ ID NO: 317. In some embodiments, the HLA-A guide RNA comprises SEQ ID NO: 318. In some embodiments, the HLA-A guide RNA comprises SEQ ID NO: 319. In some embodiments, the HLA-A guide RNA comprises SEQ ID NO: 320. In some embodiments, the HLA-A guide RNA comprises SEQ ID NO: 321. In some embodiments, the HLA-A guide RNA comprises SEQ ID NO: 322. In some embodiments, the HLA-A guide RNA comprises SEQ ID NO: 323. In some embodiments, the HLA-A guide RNA comprises SEQ ID NO: 324. In some embodiments, the HLA-A guide RNA comprises SEQ ID NO: 325. In some embodiments, the HLA-A guide RNA comprises SEQ ID NO: 326. In some embodiments, the HLA-A guide RNA comprises SEQ ID NO: 327. In some embodiments, the HLA-A guide RNA comprises SEQ ID NO: 328. In some embodiments, the HLA-A guide RNA comprises SEQ ID NO: 329. In some embodiments, the HLA-A guide RNA comprises SEQ ID NO: 330. In some embodiments, the HLA-A guide RNA comprises SEQ ID NO: 331. In some embodiments, the HLA-A guide RNA comprises SEQ ID NO: 332. In some embodiments, the HLA-A guide RNA comprises SEQ ID NO: 333. In some embodiments, the HLA-A guide RNA comprises SEQ ID NO: 334. In some embodiments, the HLA-A guide RNA comprises SEQ ID NO: 335. In some embodiments, the HLA-A guide RNA comprises SEQ ID NO: 336. In some embodiments, the HLA-A guide RNA comprises SEQ ID NO: 337. In some embodiments, the HLA-A guide RNA comprises SEQ ID NO: 338. In some embodiments, the HLA-A guide RNA comprises SEQ ID NO: 339. In some embodiments, the HLA-A guide RNA comprises SEQ ID NO: 340. In some embodiments, the HLA-A guide RNA comprises SEQ ID NO: 341. In some embodiments, the HLA-A guide RNA comprises SEQ ID NO: 342. In some embodiments, the HLA-A guide RNA comprises SEQ ID NO: 343. In some embodiments, the HLA-A guide RNA comprises SEQ ID NO: 344. In some embodiments, the HLA-A guide RNA comprises SEQ ID NO: 345. In some embodiments, the HLA-A guide RNA comprises SEQ ID NO: 346. In some embodiments, the HLA-A guide RNA comprises SEQ ID NO: 347. In some embodiments, the HLA-A guide RNA comprises SEQ ID NO: 348. In some embodiments, the HLA-A guide RNA comprises SEQ ID NO: 349. In some embodiments, the HLA-A guide RNA comprises SEQ ID NO: 350. In some embodiments, the HLA-A guide RNA comprises SEQ ID NO: 351. In some embodiments, the HLA-A guide RNA comprises SEQ ID NO: 352. In some embodiments, the HLA-A guide RNA comprises SEQ ID NO: 353. In some embodiments, the HLA-A guide RNA comprises SEQ ID NO: 354. In some embodiments, the HLA-A guide RNA comprises SEQ ID NO: 355. In some embodiments, the HLA-A guide RNA comprises SEQ ID NO: 356. In some embodiments, the HLA-A guide RNA comprises SEQ ID NO: 357. In some embodiments, the HLA-A guide RNA comprises SEQ ID NO: 358. In some embodiments, the HLA-A guide RNA comprises SEQ ID NO: 359. In some embodiments, the HLA-A guide RNA comprises SEQ ID NO: 360. In some embodiments, the HLA-A guide RNA comprises SEQ ID NO: 361. In some embodiments, the HLA-A guide RNA comprises SEQ ID NO: 362. In some embodiments, the HLA-A guide RNA comprises SEQ ID NO: 363. In some embodiments, the HLA-A guide RNA comprises SEQ ID NO: 364. In some embodiments, the HLA-A guide RNA comprises SEQ ID NO: 365. In some embodiments, the HLA-A guide RNA comprises SEQ ID NO: 366. In some embodiments, the HLA-A guide RNA comprises SEQ ID NO: 367. In some embodiments, the HLA-A guide RNA comprises SEQ ID NO: 368. In some embodiments, the HLA-A guide RNA comprises SEQ ID NO: 369. In some embodiments, the HLA-A guide RNA comprises SEQ ID NO: 370. In some embodiments, the HLA-A guide RNA comprises SEQ ID NO: 371. In some embodiments, the HLA-A guide RNA comprises SEQ ID NO: 372. In some embodiments, the HLA-A guide RNA comprises SEQ ID NO: 373. In some embodiments, the HLA-A guide RNA comprises SEQ ID NO: 374. In some embodiments, the HLA-A guide RNA comprises SEQ ID NO: 375. In some embodiments, the HLA-A guide RNA comprises SEQ ID NO: 376. In some embodiments, the HLA-A guide RNA comprises SEQ ID NO: 377. In some embodiments, the HLA-A guide RNA comprises SEQ ID NO: 378. In some embodiments, the HLA-A guide RNA comprises SEQ ID NO: 379. In some embodiments, the HLA-A guide RNA comprises SEQ ID NO: 380. In some embodiments, the HLA-A guide RNA comprises SEQ ID NO: 381. In some embodiments, the HLA-A guide RNA comprises SEQ ID NO: 382. In some embodiments, the HLA-A guide RNA comprises SEQ ID NO: 383. In some embodiments, the HLA-A guide RNA comprises SEQ ID NO: 384. In some embodiments, the HLA-A guide RNA comprises SEQ ID NO: 385. In some embodiments, the HLA-A guide RNA comprises SEQ ID NO: 386. In some embodiments, the HLA-A guide RNA comprises SEQ ID NO: 387. In some embodiments, the HLA-A guide RNA comprises SEQ ID NO: 388. In some embodiments, the HLA-A guide RNA comprises SEQ ID NO: 389. In some embodiments, the HLA-A guide RNA comprises SEQ ID NO: 390. In some embodiments, the HLA-A guide RNA comprises SEQ ID NO: 391. In some embodiments, the HLA-A guide RNA comprises SEQ ID NO: 392. In some embodiments, the HLA-A guide RNA comprises SEQ ID NO: 393. In some embodiments, the HLA-A guide RNA comprises SEQ ID NO: 394. In some embodiments, the HLA-A guide RNA comprises SEQ ID NO: 395. In some embodiments, the HLA-A guide RNA comprises SEQ ID NO: 396. In some embodiments, the HLA-A guide RNA comprises SEQ ID NO: 397. In some embodiments, the HLA-A guide RNA comprises SEQ ID NO: 398. In some embodiments, the HLA-A guide RNA comprises SEQ ID NO: 399. In some embodiments, the HLA-A guide RNA comprises SEQ ID NO: 400. In some embodiments, the HLA-A guide RNA comprises SEQ ID NO: 401. In some embodiments, the HLA-A guide RNA comprises SEQ ID NO: 402. In some embodiments, the HLA-A guide RNA comprises SEQ ID NO: 403. In some embodiments, the HLA-A guide RNA comprises SEQ ID NO: 404. In some embodiments, the HLA-A guide RNA comprises SEQ ID NO: 405. In some embodiments, the HLA-A guide RNA comprises SEQ ID NO: 406. In some embodiments, the HLA-A guide RNA comprises SEQ ID NO: 407. In some embodiments, the HLA-A guide RNA comprises SEQ ID NO: 408. In some embodiments, the HLA-A guide RNA comprises SEQ ID NO: 409. In some embodiments, the HLA-A guide RNA comprises SEQ ID NO: 410. In some embodiments, the HLA-A guide RNA comprises SEQ ID NO: 411. In some embodiments, the HLA-A guide RNA comprises SEQ ID NO: 412. In some embodiments, the HLA-A guide RNA comprises SEQ ID NO: 413. In some embodiments, the HLA-A guide RNA comprises SEQ ID NO: 414. In some embodiments, the HLA-A guide RNA comprises SEQ ID NO: 415. In some embodiments, the HLA-A guide RNA comprises SEQ ID NO: 416. In some embodiments, the HLA-A guide RNA comprises SEQ ID NO: 417. In some embodiments, the HLA-A guide RNA comprises SEQ ID NO: 418. In some embodiments, the HLA-A guide RNA comprises SEQ ID NO: 419. In some embodiments, the HLA-A guide RNA comprises SEQ ID NO: 420. In some embodiments, the HLA-A guide RNA comprises SEQ ID NO: 421. In some embodiments, the HLA-A guide RNA comprises SEQ ID NO: 422. In some embodiments, the HLA-A guide RNA comprises SEQ ID NO: 423. In some embodiments, the HLA-A guide RNA comprises SEQ ID NO: 424. In some embodiments, the HLA-A guide RNA comprises SEQ ID NO: 425. In some embodiments, the HLA-A guide RNA comprises SEQ ID NO: 426. In some embodiments, the HLA-A guide RNA comprises SEQ ID NO: 427. In some embodiments, the HLA-A guide RNA comprises SEQ ID NO: 428. In some embodiments, the HLA-A guide RNA comprises SEQ ID NO: 429. In some embodiments, the HLA-A guide RNA comprises SEQ ID NO: 430. In some embodiments, the HLA-A guide RNA comprises SEQ ID NO: 431. In some embodiments, the HLA-A guide RNA comprises SEQ ID NO: 432. In some embodiments, the HLA-A guide RNA comprises SEQ ID NO: 433. In some embodiments, the HLA-A guide RNA comprises SEQ ID NO: 434. In some embodiments, the HLA-A guide RNA comprises SEQ ID NO: 435. In some embodiments, the HLA-A guide RNA comprises SEQ ID NO: 436. In some embodiments, the HLA-A guide RNA comprises SEQ ID NO: 437. In some embodiments, the HLA-A guide RNA comprises SEQ ID NO: 438. In some embodiments, the HLA-A guide RNA comprises SEQ ID NO: 439. In some embodiments, the HLA-A guide RNA comprises SEQ ID NO: 440. In some embodiments, the HLA-A guide RNA comprises SEQ ID NO: 441. In some embodiments, the HLA-A guide RNA comprises SEQ ID NO: 442. In some embodiments, the HLA-A guide RNA comprises SEQ ID NO: 443. In some embodiments, the HLA-A guide RNA comprises SEQ ID NO: 444. In some embodiments, the HLA-A guide RNA comprises SEQ ID NO: 445. In some embodiments, the HLA-A guide RNA comprises SEQ ID NO: 446. In some embodiments, the HLA-A guide RNA comprises SEQ ID NO: 447. In some embodiments, the HLA-A guide RNA comprises SEQ ID NO: 448. In some embodiments, the HLA-A guide RNA comprises SEQ ID NO: 449. In some embodiments, the HLA-A guide RNA comprises SEQ ID NO: 450. In some embodiments, the HLA-A guide RNA comprises SEQ ID NO: 451. In some embodiments, the HLA-A guide RNA comprises SEQ ID NO: 452. In some embodiments, the HLA-A guide RNA comprises SEQ ID NO: 453. In some embodiments, the HLA-A guide RNA comprises SEQ ID NO: 454. In some embodiments, the HLA-A guide RNA comprises SEQ ID NO: 455. In some embodiments, the HLA-A guide RNA comprises SEQ ID NO: 456. In some embodiments, the HLA-A guide RNA comprises SEQ ID NO: 457. In some embodiments, the HLA-A guide RNA comprises SEQ ID NO: 458. In some embodiments, the HLA-A guide RNA comprises SEQ ID NO: 459. In some embodiments, the HLA-A guide RNA comprises SEQ ID NO: 460. In some embodiments, the HLA-A guide RNA comprises SEQ ID NO: 461. In some embodiments, the HLA-A guide RNA comprises SEQ ID NO: 462. In some embodiments, the HLA-A guide RNA comprises SEQ ID NO: 463. In some embodiments, the HLA-A guide RNA comprises SEQ ID NO: 464. In some embodiments, the HLA-A guide RNA comprises SEQ ID NO: 465. In some embodiments, the HLA-A guide RNA comprises SEQ ID NO: 466. In some embodiments, the HLA-A guide RNA comprises SEQ ID NO: 467. In some embodiments, the HLA-A guide RNA comprises SEQ ID NO: 468. In some embodiments, the HLA-A guide RNA comprises SEQ ID NO: 469. In some embodiments, the HLA-A guide RNA comprises SEQ ID NO: 470. In some embodiments, the HLA-A guide RNA comprises SEQ ID NO: 471. In some embodiments, the HLA-A guide RNA comprises SEQ ID NO: 472. In some embodiments, the HLA-A guide RNA comprises SEQ ID NO: 473. In some embodiments, the HLA-A guide RNA comprises SEQ ID NO: 474. In some embodiments, the HLA-A guide RNA comprises SEQ ID NO: 475. In some embodiments, the HLA-A guide RNA comprises SEQ ID NO: 476. In some embodiments, the HLA-A guide RNA comprises SEQ ID NO: 477. In some embodiments, the HLA-A guide RNA comprises SEQ ID NO: 478. In some embodiments, the HLA-A guide RNA comprises SEQ ID NO: 479. In some embodiments, the HLA-A guide RNA comprises SEQ ID NO: 480. In some embodiments, the HLA-A guide RNA comprises SEQ ID NO: 481. In some embodiments, the HLA-A guide RNA comprises SEQ ID NO: 482. In some embodiments, the HLA-A guide RNA comprises SEQ ID NO: 483. In some embodiments, the HLA-A guide RNA comprises SEQ ID NO: 484. In some embodiments, the HLA-A guide RNA comprises SEQ ID NO: 485. In some embodiments, the HLA-A guide RNA comprises SEQ ID NO: 486. In some embodiments, the HLA-A guide RNA comprises SEQ ID NO: 487. In some embodiments, the HLA-A guide RNA comprises SEQ ID NO: 488. In some embodiments, the HLA-A guide RNA comprises SEQ ID NO: 489. In some embodiments, the HLA-A guide RNA comprises SEQ ID NO: 490. In some embodiments, the HLA-A guide RNA comprises SEQ ID NO: 491. In some embodiments, the HLA-A guide RNA comprises SEQ ID NO: 492. In some embodiments, the HLA-A guide RNA comprises SEQ ID NO: 493. In some embodiments, the HLA-A guide RNA comprises SEQ ID NO: 494. In some embodiments, the HLA-A guide RNA comprises SEQ ID NO: 495. In some embodiments, the HLA-A guide RNA comprises SEQ ID NO: 496. In some embodiments, the HLA-A guide RNA comprises SEQ ID NO: 497. In some embodiments, the HLA-A guide RNA comprises SEQ ID NO: 498. In some embodiments, the HLA-A guide RNA comprises SEQ ID NO: 499. In some embodiments, the HLA-A guide RNA comprises SEQ ID NO: 500. In some embodiments, the HLA-A guide RNA comprises SEQ ID NO: 501. In some embodiments, the HLA-A guide RNA comprises SEQ ID NO: 502. In some embodiments, the HLA-A guide RNA comprises SEQ ID NO: 503. In some embodiments, the HLA-A guide RNA comprises SEQ ID NO: 504. In some embodiments, the HLA-A guide RNA comprises SEQ ID NO: 505. In some embodiments, the HLA-A guide RNA comprises SEQ ID NO: 506. In some embodiments, the HLA-A guide RNA comprises SEQ ID NO: 507. In some embodiments, the HLA-A guide RNA comprises SEQ ID NO: 508. In some embodiments, the HLA-A guide RNA comprises SEQ ID NO: 509. In some embodiments, the HLA-A guide RNA comprises SEQ ID NO: 510. In some embodiments, the HLA-A guide RNA comprises SEQ ID NO: 511. In some embodiments, the HLA-A guide RNA comprises SEQ ID NO: 512. In some embodiments, the HLA-A guide RNA comprises SEQ ID NO: 513. In some embodiments, the HLA-A guide RNA comprises SEQ ID NO: 514. In some embodiments, the HLA-A guide RNA comprises SEQ ID NO: 515. In some embodiments, the HLA-A guide RNA comprises SEQ ID NO: 516. In some embodiments, the HLA-A guide RNA comprises SEQ ID NO: 517. In some embodiments, the HLA-A guide RNA comprises SEQ ID NO: 518. In some embodiments, the HLA-A guide RNA comprises SEQ ID NO: 519. In some embodiments, the HLA-A guide RNA comprises SEQ ID NO: 520. In some embodiments, the HLA-A guide RNA comprises SEQ ID NO: 521. In some embodiments, the HLA-A guide RNA comprises SEQ ID NO: 522. In some embodiments, the HLA-A guide RNA comprises SEQ ID NO: 523. In some embodiments, the HLA-A guide RNA comprises SEQ ID NO: 524. In some embodiments, the HLA-A guide RNA comprises SEQ ID NO: 525. In some embodiments, the HLA-A guide RNA comprises SEQ ID NO: 526. In some embodiments, the HLA-A guide RNA comprises SEQ ID NO: 527. In some embodiments, the HLA-A guide RNA comprises SEQ ID NO: 528. In some embodiments, the HLA-A guide RNA comprises SEQ ID NO: 529. In some embodiments, the HLA-A guide RNA comprises SEQ ID NO: 530. In some embodiments, the HLA-A guide RNA comprises SEQ ID NO: 531. In some embodiments, the HLA-A guide RNA comprises SEQ ID NO: 532. In some embodiments, the HLA-A guide RNA comprises SEQ ID NO: 533. In some embodiments, the HLA-A guide RNA comprises SEQ ID NO: 534. In some embodiments, the HLA-A guide RNA comprises SEQ ID NO: 535. In some embodiments, the HLA-A guide RNA comprises SEQ ID NO: 536. In some embodiments, the HLA-A guide RNA comprises SEQ ID NO: 537. In some embodiments, the HLA-A guide RNA comprises SEQ ID NO: 538. In some embodiments, the HLA-A guide RNA comprises SEQ ID NO: 540. In some embodiments, the HLA-A guide RNA comprises SEQ ID NO: 541. In some embodiments, the HLA-A guide RNA comprises SEQ ID NO: 542. In some embodiments, the HLA-A guide RNA comprises SEQ ID NO: 543. In some embodiments, the HLA-A guide RNA comprises SEQ ID NO: 544. In some embodiments, the HLA-A guide RNA comprises SEQ ID NO: 545. In some embodiments, the HLA-A guide RNA comprises SEQ ID NO: 546. In some embodiments, the HLA-A guide RNA comprises SEQ ID NO: 547. In some embodiments, the HLA-A guide RNA comprises SEQ ID NO: 548. In some embodiments, the HLA-A guide RNA comprises SEQ ID NO: 549. In some embodiments, the HLA-A guide RNA comprises SEQ ID NO: 550. In some embodiments, the HLA-A guide RNA comprises SEQ ID NO: 551. In some embodiments, the HLA-A guide RNA comprises SEQ ID NO: 552. In some embodiments, the HLA-A guide RNA comprises SEQ ID NO: 553. In some embodiments, the HLA-A guide RNA comprises SEQ ID NO: 554. In some embodiments, the HLA-A guide RNA comprises SEQ ID NO: 555. In some embodiments, the HLA-A guide RNA comprises SEQ ID NO: 556. In some embodiments, the HLA-A guide RNA comprises SEQ ID NO: 557. In some embodiments, the HLA-A guide RNA comprises SEQ ID NO: 558. In some embodiments, the HLA-A guide RNA comprises SEQ ID NO: 559. In some embodiments, the HLA-A guide RNA comprises SEQ ID NO: 560. In some embodiments, the HLA-A guide RNA comprises SEQ ID NO: 561. In some embodiments, the HLA-A guide RNA comprises SEQ ID NO: 562. In some embodiments, the HLA-A guide RNA comprises SEQ ID NO: 563. In some embodiments, the HLA-A guide RNA comprises SEQ ID NO: 564. In some embodiments, the HLA-A guide RNA comprises SEQ ID NO: 565. In some embodiments, the HLA-A guide RNA comprises SEQ ID NO: 566. In some embodiments, the HLA-A guide RNA comprises SEQ ID NO: 567. In some embodiments, the HLA-A guide RNA comprises SEQ ID NO: 568. In some embodiments, the HLA-A guide RNA comprises SEQ ID NO: 569. In some embodiments, the HLA-A guide RNA comprises SEQ ID NO: 570. In some embodiments, the HLA-A guide RNA comprises SEQ ID NO: 571. In some embodiments, the HLA-A guide RNA comprises SEQ ID NO: 572. In some embodiments, the HLA-A guide RNA comprises SEQ ID NO: 573. In some embodiments, the HLA-A guide RNA comprises SEQ ID NO: 574. In some embodiments, the HLA-A guide RNA comprises SEQ ID NO: 575. In some embodiments, the HLA-A guide RNA comprises SEQ ID NO: 576. In some embodiments, the HLA-A guide RNA comprises SEQ ID NO: 577. In some embodiments, the HLA-A guide RNA comprises SEQ ID NO: 580. In some embodiments, the HLA-A guide RNA comprises SEQ ID NO: 581. In some embodiments, the HLA-A guide RNA comprises SEQ ID NO: 582. In some embodiments, the HLA-A guide RNA comprises SEQ ID NO: 583. In some embodiments, the HLA-A guide RNA comprises SEQ ID NO: 584. In some embodiments, the HLA-A guide RNA comprises SEQ ID NO: 585. In some embodiments, the HLA-A guide RNA comprises SEQ ID NO: 586. In some embodiments, the HLA-A guide RNA comprises SEQ ID NO: 587. In some embodiments, the HLA-A guide RNA comprises SEQ ID NO: 588. In some embodiments, the HLA-A guide RNA comprises SEQ ID NO: 589. In some embodiments, the HLA-A guide RNA comprises SEQ ID NO: 590.

[0630] Additional embodiments of HLA-A guide RNAs are provided herein, including e.g., exemplary modifications to the guide RNA.

### 4. Genetic Modifications to HLA-A

[0631] In some embodiments, the methods and compositions disclosed herein genetically modify at least one nucleotide in the HLA-A gene in a cell. Genetic modifications encompass the population of modifications that results from contact with a gene editing system (e.g., the population of edits that result from Cas9 and an HLA-A guide RNA, or the population of edits that result from BC22 and an HLA-A guide RNA). Methods and compositions for genetic modification of the HLA-A gene are provided in PCT/US2021/064930, the entire contents of which is incorporated herein by reference.

[0632] The following embodiments are directed to the genetic modification in the HLA-A gene:

[0633] In some embodiments, the genetic modification comprises at least one nucleotide within the genomic coordinates chosen from: chr6:29942854-chr6:29942913 and chr6:29943518-chr6: 29943619.

[0634] In some embodiments, the genetic modification comprises at least one nucleotide within the genomic coordinates chr6:29942864-chr6: 29942903.

[0635] In some embodiments, the genetic modification comprises at least one nucleotide within the genomic coordinates chr6:29943528-chr6:29943609.

[0636] In some embodiments, the genetic modification comprises at least one nucleotide within the genomic coordinates chr6:29942864-29942884; chr6:29942868-29942888; chr6:29942876-29942896; chr6:29942877-29942897; and chr6:29942883-29942903.

[0637] In some embodiments, the genetic modification comprises at least one nucleotide within the genomic coordinates chr6:29942864-29942884; chr6:29942864-29942884; chr6:29944266-29944290; chr6:29942889-29942913; chr6:29942609-29942633; chr6:29942891-29942915; chr6:29944471-29944495; and chr6:29944470-29944494.

[0638] In some embodiments, the genetic modification comprises at least one nucleotide within the genomic coordinates chr6:29942609-29942633; and chr6:29942891-29942915.

[0639] In some embodiments, the genetic modification comprises at least one nucleotide within the genomic coordinates chr6:29943528-29943548; chr6:29943529-29943549; chr6:29943530-29943550; chr6:29943537-29943557; chr6:29943549-29943569; and chr6:29943589-29943609.

[0640] In some embodiments, the genetic modification comprises at least one nucleotide within the genomic coordinates chr6:29942876-29942897.

[0641] In some embodiments, the genetic modification comprises at least one nucleotide within the genomic coordinates chr6:29943528-chr629943550.

[0642] In some embodiments, the genetic modification comprises at least one nucleotide within the genomic coordinates chosen from: chr6:29942864-29942884, chr6:29942868-29942888, chr6:29942876-29942896, and chr6:29942877-29942897.

[0643] In some embodiments, the genetic modification comprises at least one nucleotide within the genomic coordinates chosen from: chr6:29943528-29943548, chr6:29943529-29943549, and chr6:29943530-29943550.

[0644] In some embodiments, the genetic modification comprises at least one nucleotide within the genomic coordinates chr6:29942864-29942884; chr6:29942868-29942888; chr6:29942876-29942896; chr6:29942877-29942897; chr6:29942883-29942903; chr6:29943126-29943146; chr6:29943528-29943548; chr6:29943529-29943549; chr6:29943530-29943550; chr6:29943537-29943557; chr6:29943549-29943569; chr6:29943589-29943609; and chr6:29944026-29944046.

[0645] In some embodiments, the genetic modification comprises an indel, a C to T substitution, or an A to G substitution within the genomic coordinates chosen from; chr6:29942864-29942884; chr6:29942868-29942888; chr6:29942876-29942896; chr6:29942877-29942897; chr6:29942883-29942903; chr6:29943126-29943146; chr6:29943528-29943548; chr6:29943529-29943549; chr6:29943530-29943550; chr6:29943537-29943557; chr6:29943549-29943569; chr6:29943589-29943609; and chr6:29944026-29944046.

[0646] In some embodiments, the genetic modification comprises an indel, a C to T substitution, or an A to G substitution within the genomic coordinates chosen from; chr6:29942864-29942884; chr6:29942868-29942888; chr6:29942876-29942896; chr6:29942877-29942897; chr6:29942883-29942903; chr6:29943126-29943146; chr6:29943528-29943548; chr6:29943529-29943549; chr6:29943530-29943550; chr6:29943537-29943557; chr6:29943549-29943569; chr6:29943589-29943609; and chr6:29944026-29944046, chr6:29934330-29934350, chr6:29943115-29943135, chr6:29943135-29943155, chr6:29943140-29943160, chr6:29943590-29943610, chr6:29943824-29943844, chr6:29943858-29943878, chr6:29944478-29944498, and chr6:29944850-29944870.

[0647] In some embodiments, the genetic modification comprises an indel, a C to T substitution, or an A to G substitution within the genomic coordinates chosen from; chr6:29942864-29942884; chr6:29942868-29942888; chr6:29942876-29942896; chr6:29942877-29942897; chr6:29942883-29942903; chr6:29943126-29943146; chr6:29943528-29943548; chr6:29943529-29943549; chr6:29943530-29943550; chr6:29943537-29943557; chr6:29943549-29943569; chr6:29943589-29943609; and chr6:29944026-29944046.

[0648] In some embodiments, the genetic modification comprises an indel, a C to T substitution, or an A to G substitution within the genomic coordinates chosen from; chr6:29942864-29942884; chr6:29942868-29942888; chr6:29942876-29942896; chr6:29942877-29942897; chr6:29942883-29942903; chr6:29943528-29943548; chr6:29943529-29943549; chr6:29943530-29943550; chr6:29943537-29943557; chr6:29943549-29943569; and chr6:29943589-29943609.

[0649] In some embodiments, the genetic modification comprises an indel, a C to T substitution, or an A to G substitution within the genomic coordinates chosen from; chr6:29942864-29942884; chr6:29942868-29942888; chr6:29942876-29942896; chr6:29942877-29942897; and chr6:29942883-29942903.

[0650] In some embodiments, the genetic modification comprises an indel, a C to T substitution, or an A to G substitution within the genomic coordinates chosen from; chr6:29943528-29943548; chr6:29943529-29943549; chr6:29943530-29943550; chr6:29943537-29943557; chr6:29943549-29943569; and chr6:29943589-29943609.

[0651] In some embodiments, the genetic modification comprises an indel, a C to T substitution, or an A to G substitution within the genomic coordinates chosen from; chr6:29890117-29890137, chr6:29927058-29927078, chr6:29934330-29934350, chr6:29942541-29942561, chr6:29942542-29942562, chr6:29942543-29942563, chr6:29942543-29942563, chr6:29942550-29942570, chr6:29942864-29942884, chr6:29942868-29942888, chr6:29942876-29942896, chr6:29942876-29942896, chr6:29942877-29942897, chr6:29942883-29942903, chr6:29943062-29943082, chr6:29943063-29943083, chr6:29943092-29943112, chr6:29943115-29943135, chr6:29943118-29943138, chr6:29943119-29943139, chr6:29943120-29943140, chr6:29943126-29943146, chr6:29943128-29943148, chr6:29943129-29943149, chr6:29943134-29943154, chr6:29943134-29943154, chr6:29943135-29943155, chr6:29943136-29943156, chr6:29943140-29943160, chr6:29943142-29943162, chr6:29943143-29943163, chr6:29943188-29943208, chr6:29943528-29943548, chr6:29943529-29943549, chr6:29943530-29943550, chr6:29943536-29943556, chr6:29943537-29943557, chr6:29943538-29943558, chr6:29943549-29943569, chr6:29943556-29943576, chr6:29943589-29943609, chr6:29943590-29943610, chr6:29943590-29943610, chr6:29943599-29943619, chr6:29943600-29943620, chr6:29943601-29943621, chr6:29943602-29943622, chr6:29943603-29943623, chr6:29943774-29943794, chr6:29943779-29943799, chr6:29943780-29943800, chr6:29943822-29943842, chr6:29943824-29943844, chr6:29943857-29943877, chr6:29943858-29943878, chr6:29943859-29943879, chr6:29943860-29943880, chr6:29944026-29944046, chr6:29944077-29944097, chr6:29944078-29944098, chr6:29944458-29944478, chr6:29944478-29944498, chr6:29944597-29944617, chr6:29944642-29944662, chr6:29944643-29944663, chr6:29944772-29944792, chr6:29944782-29944802, chr6:29944850-29944870, chr6:29944907-29944927, chr6:29945024-29945044, chr6:29945097-29945117, chr6:29945104-29945124, chr6:29945105-29945125, chr6:29945116-29945136, chr6:29945118-29945138, chr6:29945119-29945139, chr6:29945124-29945144, chr6:29945176-29945196, chr6:29945177-29945197, chr6:29945177-29945197, chr6:29945180-29945200, chr6:29945187-29945207, chr6:29945188-29945208, chr6:29945228-29945248, chr6:29945230-29945250, chr6:29945231-29945251, chr6:29945232-29945252, chr6:29945308-29945328, chr6:29945361-29945381, chr6:29945362-29945382, and chr6:31382543-31382563.

[0652] In some embodiments, the genetic modification comprises an indel, a C to T substitution, or an A to G substitution within the genomic coordinates chosen from; chr6:29942815-29942835, chr6:29942816-29942836, chr6:29942817-29942837, chr6:29942817-29942837, chr6:29942828-29942848, chr6:29942837-29942857, chr6:29942885-29942905, chr6:29942895-29942915, chr6:29942896-29942916, chr6:29942898-29942918, chr6:29942899-29942919, chr6:29942900-29942920, chr6:29942904-29942924, chr6:29942905-29942925, chr6:29942912-29942932, chr6:29942913-29942933, chr6:29943490-29943510, chr6:29943497-29943517, chr6:29943498-29943518, chr6:29943502-29943522, chr6:29943502-29943522, chr6:29943511-29943531, chr6:29943520-29943540, chr6:29943521-29943541, chr6:29943566-29943586, chr6:29943569-29943589, chr6:29943569-29943589, chr6:29943570-29943590, chr6:29943573-29943593, chr6:29943578-29943598, chr6:29943585-29943605, chr6:29943589-29943609, chr6:29943568-29943588, and chr6:29942815-29942835.

[0653] In some embodiments, the genetic modification comprises an indel, a C to T substitution, or an A to G substitution within the genomic coordinates chosen from; chr6:29942884-29942904, chr6:29943519-29943539, chr6:29942863-29942883.

[0654] In some embodiments, the genetic modification comprises an indel, a C to T substitution, or an A to G substitution within the genomic coordinates chosen from; chr6:29943517-29943537, and chr6:29943523-29943543.

[0655] In some embodiments, the genetic modification comprises an indel, a C to T substitution, or an A to G substitution within the genomic coordinates chosen from; chr6:29942845-29942869, chr6:29942852-29942876, chr6:29942865-29942889, chr6:29942891-29942915, chr6:29942895-29942919, chr6:29942903-29942927, chr6:29942904-29942928, chr6:29943518-29943542, chr6:29943525-29943549, chr6:29943535-29943559, chr6:29943538-29943562, chr6:29943539-29943563, chr6:29943547-29943571, chr6:29943547-29943571, chr6:29943548-29943572, chr6:29943555-29943579, chr6:29943556-29943580, chr6:29943557-29943581, chr6:29943558-29943582, chr6:29943559-29943583, chr6:29943563-29943587, chr6:29943564-29943588, chr6:29943565-29943589, chr6:29943568-29943592, chr6:29943571-29943595, chr6:29943572-29943596, chr6:29943595-29943619, chr6:29943596-29943620, chr6:29943600-29943624.

[0656] In some embodiments, the genetic modification comprises an indel, a C to T substitution, or an A to G substitution within the genomic coordinates chosen from; chr6:29942885-29942905, chr6:29942895-29942915, chr6:29942896-29942916, chr6:29942898-29942918, chr6:29942899-29942919, chr6:29942900-29942920, chr6:29942904-29942924, chr6:29943511-29943531, chr6:29943520-29943540, chr6:29943521-29943541, chr6:29943529-29943549, chr6:29943566-29943586, chr6:29943568-29943588, chr6:29943569-29943589, chr6:29943569-29943589, chr6:29943570-29943590, chr6:29943573-29943593, chr6:29943578-29943598, chr6:29943585-29943605, and chr6:29943589-29943609.

[0657] In some embodiments, the genetic modification comprises an indel, a C to T substitution, or an A to G substitution within the genomic coordinates chosen from; chr6:29942469-29942489, chr6:29943058-29943078, chr6:29943063-29943083, chr6:29943080-29943100, chr6:29943187-29943207, chr6:29943192-29943212, chr6:29943197-29943217, chr6:29943812-29943832, chr6:29944349-29944369, chr6:29944996-29945016, chr6:29945018-29945038, chr6:29945341-29945361, chr6:29945526-29945546.

[0658] In some embodiments, the genetic modification comprises an indel, a C to T substitution, or an A to G substitution within the genomic coordinates: chr6:29942876-29942897.

[0659] In some embodiments, the genetic modification comprises an indel, a C to T substitution, or an A to G substitution within the genomic coordinates chosen from; chr6:29942864-29942884, chr6:29942868-29942888, chr6:29942876-29942896, and chr6:29942877-29942897.

[0660] In some embodiments, the genetic modification comprises an indel, a C to T substitution, or an A to G substitution within the genomic coordinates: chr6:29943528-chr629943550.

[0661] In some embodiments, the genetic modification comprises an indel, a C to T substitution, or an A to G substitution within the genomic coordinates chosen from; chr6:29943528-29943548, chr6:29943529-29943549, and chr6:29943530-29943550.

[0662] In some embodiments, the modification to HLA-A comprises any one or more of an insertion, deletion, substitution, or deamination of at least one nucleotide in a target sequence. In some embodiments, the modification to HLA-A comprises an insertion of 1, 2, 3, 4 or 5 or more nucleotides in a target sequence. In some embodiments, the modification to HLA-A comprises a deletion of 1, 2, 3, 4 or 5 or more nucleotides in a target sequence. In other embodiments, the modification to HLA-A comprises an insertion of 1, 2, 3, 4, 5, 6, 7, 8, 9, 10, 15, 20 or 25 or more nucleotides in a target sequence. In other embodiments, the modification to HLA-A comprises a deletion of 1, 2, 3, 4, 5, 6, 7, 8, 9, 10, 15, 20 or 25 or more nucleotides in a target sequence. In some embodiments, the modification to HLA-A comprises an indel, which is generally defined in the art as an insertion or deletion of less than 1000 base pairs (bp). In some embodiments, the modification to HLA-A comprises an indel which results in a frameshift mutation in a target sequence. In some embodiments, the modification to HLA-A comprises a substitution of 1, 2, 3, 4, 5, 6, 7, 8, 9, 10, 15, 20 or 25 or more nucleotides in a target sequence. In some embodiments, the modification to HLA-A comprises one or more of an insertion, deletion, or substitution of nucleotides resulting from the incorporation of a template nucleic acid. In some embodiments, the modification to HLA-A comprises an insertion of a donor nucleic acid in a target sequence. In some embodiments, the modification to HLA-A is not transient.

### 5. Efficacy of HLA-A and HLA-B Guide RNAs

[0663] The efficacy of an HLA-B guide RNA may be determined by techniques available in the art that assess the editing efficiency of a guide RNA, and the surface expression of HLA-A or HLA-B protein. In some embodiments, the reduction or elimination of surface expression of HLA-A or HLA-B protein may be determined by comparison to an unmodified cell (or “relative to an unmodified cell”). An engineered cell or cell population may also be compared to a population of unmodified cells.

[0664] An “unmodified cell” (or “unmodified cells”) refers to a control cell (or cells) of the same type of cell in an experiment or test, wherein the “unmodified” control cell has not been contacted with an HLA-A or HLA-B guide. Therefore, an unmodified cell (or cells) may be a cell that has not been contacted with a guide RNA, or a cell that has been contacted with a guide RNA that does not target HLA-A or HLA-B.

[0665] In some embodiments, the efficacy of an HLA-A or HLA-B guide RNA is determined by measuring levels of surface expression of HLA-A or HLA-B protein. In some embodiments, HLA-A or HLA-B protein levels are measured by flow cytometry (e.g., with an antibody against HLA-B7/HLA-B8). Surface expression of HLA-A or HLA-B protein may be measured by flow cytometry as commonly known in the art. One skilled in the art will be familiar with techniques for measuring surface expression of protein such as HLA-A or HLA-B protein, by flow cytometry. An exemplary measurement of levels of surface expression of HLA-A or HLA-B protein by flow cytometry is discussed in Examples 2-3 and 5-8. In some embodiments, the population of cells is enriched (e.g., by FACS or MACS) and is at least 65%, 70%, 80%, 90%, 91%, 92%, 93%, or 94% HLA-A or HLA-B negative as measured by flow cytometry relative to a population of unmodified cells. In some embodiments, the population of cells is not enriched (e.g., by FACS or MACS) and is at least 65%, 70%, 80%, 90%, 91%, 92%, 93%, or 94% HLA-A or HLA-B negative as measured by flow cytometry relative to a population of unmodified cells. In some embodiments, the population of cells is at least 65% HLA-A or HLA-B negative as measured by flow cytometry relative to a population of unmodified cells. In some embodiments, the population of cells is at least 70% HLA-A or HLA-B negative as measured by flow cytometry relative to a population of unmodified cells. In some embodiments, the population of cells is at least 80% HLA-A or HLA-B negative as measured by flow cytometry relative to a population of unmodified cells. In some embodiments, the population of cells is at least 90% HLA-A or HLA-B negative as measured by flow cytometry relative to a population of unmodified cells. In some embodiments, the population of cells is at least 95% MHC I negative as measured by flow cytometry relative to a population of unmodified cells. In some embodiments, the population of cells is at least 100% HLA-A or HLA-B negative as measured by flow cytometry relative to a population of unmodified cells.

[0666] In some embodiments, an effective HLA-A or HLA-B guide RNA may be determined by measuring the response of immune cells in vitro or in vivo (e.g., CD8+ T cells) to the genetically modified target cell. For example, a reduced response from CD8+ T cells is indicative of an effective HLA-A or HLA-B guide RNA. A CD8+ T cell response may be evaluated by an assay that measures CD8+ T cell activation responses, e.g., CD8+ T cell proliferation, expression of activation markers, or cytokine production (IL-2, IFN-γ, TNF-α) (e.g., flow cytometry, ELISA). The CD8+ T cell response may be assessed in vitro or in vivo. In some embodiments, the CD8+ T cell response may be evaluated by co-culturing the genetically modified cell with CD8+ T cells in vitro. In some embodiments, CD8+ T cell activity may be evaluated in an in vivo model, e.g., a rodent model. In an in vivo model, e.g., genetically modified cells may be administered with CD8+ T cell; survival of the genetically modified cells is indicative of the ability to avoid CD8+ T cell lysis. In some embodiments, the methods produce a composition comprising a cell that survives in vivo in the presence of CD8+ T cells for greater than 1, 2, 3, 4, 5, or 6 weeks or more. In some embodiments, the methods produce a composition comprising a cell that survives in vivo in the presence of CD8+ T cells for at least one week to six weeks. In some embodiments, the methods produce a composition comprising a cell that survives in vivo in the presence of CD8+ T cells for at least two to four weeks. In some embodiments, the methods produce a composition comprising a cell that survives in vivo in the presence of CD8+ T cells for at least four to six weeks. In some embodiments, the methods produce a composition comprising a cell that survives in vivo in the presence of CD8+ T cells for more than six weeks.

[0667] The efficacy of an HLA-A or HLA-B guide RNA may also be assessed by the survival of the cell post-editing. In some embodiments, the cell survives post editing for at least one week to six weeks. In some embodiments, the cell survives post editing for at least two weeks. In some embodiments, the cell survives post editing for at least three weeks. In some embodiments, the cell survives post editing for at least four weeks. In some embodiments, the cell survives post editing for at least five weeks. In some embodiments, the cell survives post editing for at least six weeks. In some embodiments, the cell survives post editing for at least one week to twelve weeks. The viability of a genetically modified cell may be measured using standard techniques, including e.g., by measures of cell death, by flow cytometry live/dead staining, or cell proliferation.

[0668] In some embodiments, the engineered cell is assessed by the persistence of the engineered human cell which has reduced or eliminated surface expression of HLA-B protein and is homozygous for HLA-A and homozygous for HLA-C. In some embodiments, the engineered cell is assessed by the persistence of the engineered human cell which has reduced or eliminated HLA-A and HLA-B expression and is homozygous for HLA-C. As used herein, “persistence” refers to the ability of the engineered cell to exist in an in vitro or in vivo environment with reactive or responding T cells or NK cells present, e.g., the ability to exist in vivo after transfer into a recipient. In some embodiments, the engineered human T cells are protective against NK-mediated rejection. In some embodiments, the ratio of viable engineered cells in vivo in the presence of NK cells relative to viable engineered cells in vivo in the absence of NK cells is at least 0.3:1 or greater, at least 20 days, at least 30 days, at least 40 days, at least 50 days, at least 60 days, at least 70 days, at least 80 days, or at least 90 days after transfer into a recipient, as demonstrated herein. In some embodiments, at least 90 days after transfer into a recipient, the ratio of viable engineered cells in vivo in the presence of NK cells relative to viable engineered cells in vivo in the absence of NK cells is at least 0.4:1 or greater, 0.5:1 or greater, 0.6:1 or greater, 0.7:1 or greater, 0.8:1 or greater, or 0.9:1 or greater, as demonstrated herein. In some embodiments, the engineered human T cells are protective against CD8+ T cell-mediated rejection.

[0669] In some embodiments, the engineered cells may be assessed using a mixed lymphocyte reaction (MLR). (See e.g., DeWolf et al., Transplantation 100:1639-1649 (2017). In some embodiments, engineered human cells are mixed with labeled unedited (non-engineered) responding T cells, and the MLR assay measures proliferation of responding T cells activated by allorecognition (i.e., through mismatched HLA molecules on the surface of the engineered human cell).

### D. Methods and Compositions for Reducing or Eliminating MHC Class II, Additional Modifications, and Edited Cells

[0670] In some embodiments, multiplex gene editing may be performed in a cell. In some embodiments, the methods comprise reducing or eliminating surface expression of HLA-B protein comprising genetically modifying the HLA-B gene comprising contacting the cell with a composition comprising a HLA-B guide RNA disclosed herein; and optionally an RNA-guided DNA binding agent or a nucleic acid encoding an RNA-guided DNA binding agent, the method further comprising contacting with one or more compositions selected from: (a) a guide RNA that directs an RNA-guided DNA binding agent to the CIITA gene; (b) a guide RNA that directs an RNA-guided DNA binding agent to a locus in the genome of the cell other than HLA-B or CIITA; and (c) a donor nucleic acid for insertion in the genome of the cell.

[0671] In some embodiments, multiplex gene editing may be performed in a cell. In some embodiments, the methods comprise reducing or eliminating surface expression of HLA-A and HLA-B protein comprising genetically modifying the HLA-A and HLA-B genes, comprising contacting the cell with a first composition comprising a HLA-A guide RNA disclosed herein; and optionally a first RNA-guided DNA binding agent or a nucleic acid encoding an RNA-guided DNA binding agent; and a second composition comprising a HLA-B guide RNA disclosed herein; and optionally a second RNA-guided DNA binding agent or a nucleic acid encoding an RNA-guided DNA binding agent; the method further comprising contacting with one or more compositions selected from: (a) a guide RNA that directs an RNA-guided DNA binding agent to the CIITA gene; (b) a guide RNA that directs an RNA-guided DNA binding agent to a locus in the genome of the cell other than HLA-A and HLA-B or CIITA; and (c) a donor nucleic acid for insertion in the genome of the cell.

[0672] In some embodiments, multiplex gene editing may be performed in a cell. In some embodiments, the methods comprise reducing or eliminating surface expression of HLA-A and HLA-B protein and reducing or eliminating expression of CIITA protein, comprising genetically modifying the HLA-A, HLA-B, and CIITA genes, comprising contacting the cell with a first composition comprising a HLA-A guide RNA disclosed herein; and optionally a first RNA-guided DNA binding agent or a nucleic acid encoding an RNA-guided DNA binding agent; and a second composition comprising a HLA-B guide RNA disclosed herein; and optionally a second RNA-guided DNA binding agent or a nucleic acid encoding an RNA-guided DNA binding agent; and a third composition comprising a CIITA guide RNA disclosed herein; and optionally a third RNA-guided DNA binding agent or a nucleic acid encoding an RNA-guided DNA binding agent; the method further optionally comprising contacting with one or more compositions selected from: (a) a guide RNA that directs an RNA-guided DNA binding agent to a locus in the genome of the cell other than HLA-A, HLA-B, and CIITA, such as TRAC, TRBC1, and/or TRBC2; and (b) a donor nucleic acid for insertion in the genome of the cell.

[0673] In some embodiments, one or more compositions for multiplex gene editing in a cell are provided. In some embodiments, the one or more compositions comprise a HLA-A guide RNA disclosed herein, a HLA-B guide RNA disclosed herein, and a CIITA guide RNA disclosed herein; and optionally (a) a guide RNA that directs an RNA-guided DNA binding agent to a locus in the genome of the cell other than HLA-A, HLA-B, and CIITA, such as TRAC, TRBC1, and/or TRBC2; and (b) a donor nucleic acid for insertion in the genome of the cell.

[0674] In some embodiments, in any of the methods and compositions disclosed herein, the HLA-A guide RNA is an HLA-A guide RNA that comprises a guide sequence disclosed herein, such as a guide sequence selected from SEQ ID NOs: 301-590. In some embodiments, the HLA-A guide RNA comprises a sequence selected from SEQ ID NOs: 571, 576, 1571, 1576, 2571, 2576, 3111, and 3112. In some embodiments, the HLA-A guide RNA comprises the sequence of SEQ ID NO: 571. In some embodiments, the HLA-A guide RNA comprises the sequence of SEQ ID NO: 576. In some embodiments, the HLA-A guide RNA comprises the sequence of SEQ ID NO: 1571. In some embodiments, the HLA-A guide RNA comprises the sequence of SEQ ID NO: 1576. In some embodiments, the HLA-A guide RNA comprises the sequence of SEQ ID NO: 2571. In some embodiments, the HLA-A guide RNA comprises the sequence of SEQ ID NO: 2576. In some embodiments, the HLA-A guide RNA comprises the sequence of SEQ ID NO: 3111. In some embodiments, the HLA-A guide RNA comprises the sequence of SEQ ID NO: 3112. In some embodiments, in any of the methods and compositions disclosed herein, the HLA-B guide RNA is an HLA-B guide RNA that comprises a guide sequence disclosed herein, such as a guide sequence selected from SEQ ID NOs: 1-91 and 101-185. In some embodiments, the HLA-B guide RNA comprises a sequence selected from SEQ ID NOs: 13, 74, 163-166, 169, 177, 1013, 1074, 1163-1166, 1169, 1177, 2013, 2074, 2163-2166, 2169, 2177, and 2186-2191. In some embodiments, the HLA-B guide RNA comprises the sequence of SEQ ID NO: 13. In some embodiments, the HLA-B guide RNA comprises the sequence of SEQ ID NO: 74. In some embodiments, the HLA-B guide RNA comprises the sequence of SEQ ID NO: 163. In some embodiments, the HLA-B guide RNA comprises the sequence of SEQ ID NO: 164. In some embodiments, the HLA-B guide RNA comprises the sequence of SEQ ID NO: 165. In some embodiments, the HLA-B guide RNA comprises the sequence of SEQ ID NO: 166. In some embodiments, the HLA-B guide RNA comprises the sequence of SEQ ID NO: 169. In some embodiments, the HLA-B guide RNA comprises the sequence of SEQ ID NO: 177. In some embodiments, the HLA-B guide RNA comprises the sequence of SEQ ID NO: 1013. In some embodiments, the HLA-B guide RNA comprises the sequence of SEQ ID NO: 1074. In some embodiments, the HLA-B guide RNA comprises the sequence of SEQ ID NO: 1163. In some embodiments, the HLA-B guide RNA comprises the sequence of SEQ ID NO: 1164. In some embodiments, the HLA-B guide RNA comprises the sequence of SEQ ID NO: 1165. In some embodiments, the HLA-B guide RNA comprises the sequence of SEQ ID NO: 1166. In some embodiments, the HLA-B guide RNA comprises the sequence of SEQ ID NO: 1169. In some embodiments, the HLA-B guide RNA comprises the sequence of SEQ ID NO: 1177. In some embodiments, the HLA-B guide RNA comprises the sequence of SEQ ID NO: 2013. In some embodiments, the HLA-B guide RNA comprises the sequence of SEQ ID NO: 2074. In some embodiments, the HLA-B guide RNA comprises the sequence of SEQ ID NO: 2163. In some embodiments, the HLA-B guide RNA comprises the sequence of SEQ ID NO: 2164. In some embodiments, the HLA-B guide RNA comprises the sequence of SEQ ID NO: 2165. In some embodiments, the HLA-B guide RNA comprises the sequence of SEQ ID NO: 2166. In some embodiments, the HLA-B guide RNA comprises the sequence of SEQ ID NO: 2169. In some embodiments, the HLA-B guide RNA comprises the sequence of SEQ ID NO: 2177. In some embodiments, the HLA-B guide RNA comprises the sequence of SEQ ID NO: 2186. In some embodiments, the HLA-B guide RNA comprises the sequence of SEQ ID NO: 2187. In some embodiments, the HLA-B guide RNA comprises the sequence of SEQ ID NO: 2188. In some embodiments, the HLA-B guide RNA comprises the sequence of SEQ ID NO: 2189. In some embodiments, the HLA-B guide RNA comprises the sequence of SEQ ID NO: 2190. In some embodiments, the HLA-B guide RNA comprises the sequence of SEQ ID NO: 2191. In some embodiments, in any of the methods and compositions disclosed herein, the CIITA guide RNA is a CIITA guide RNA that comprises a guide sequence disclosed herein, such as SEQ ID NO: 608 or 609. In some embodiments, the CIITA guide RNA comprises a sequence selected from SEQ ID NOs: 608, 609, 1608, 1609, 2608, 2609, 3116, and 3117. In some embodiments, the CIITA guide RNA comprises the sequence of SEQ ID NO: 608. In some embodiments, the CIITA guide RNA comprises the sequence of SEQ ID NO: 609. In some embodiments, the CIITA guide RNA comprises the sequence of SEQ ID NO: 1608. In some embodiments, the CIITA guide RNA comprises the sequence of SEQ ID NO: 1609. In some embodiments, the CIITA guide RNA comprises the sequence of SEQ ID NO: 2608. In some embodiments, the CIITA guide RNA comprises the sequence of SEQ ID NO: 2609. In some embodiments, the CIITA guide RNA comprises the sequence of SEQ ID NO: 3116. In some embodiments, the CIITA guide RNA comprises the sequence of SEQ ID NO: 3117. In some embodiments, in any of the methods and compositions disclosed herein, the guide RNA that directs an RNA-guided DNA binding agent to a locus in the genome of the cell other than HLA-A, HLA-B, and CIITA comprises a TRAC guide RNA and/or a TRBC guide RNA. In some embodiments, the TRAC guide RNA comprises a sequence selected from SEQ ID NOs: 605, 606, 613, 1605, 1606, 1613, 2605, 2606, 2613, 3113, and 3114. In some embodiments, the TRAC guide RNA comprises the sequence of SEQ ID NO: 605. In some embodiments, the TRAC guide RNA comprises the sequence of SEQ ID NO: 606. In some embodiments, the TRAC guide RNA comprises the sequence of SEQ ID NO: 613. In some embodiments, the TRAC guide RNA comprises the sequence of SEQ ID NO: 1605. In some embodiments, the TRAC guide RNA comprises the sequence of SEQ ID NO: 1606. In some embodiments, the TRAC guide RNA comprises the sequence of SEQ ID NO: 1613. In some embodiments, the TRAC guide RNA comprises the sequence of SEQ ID NO: 2605. In some embodiments, the TRAC guide RNA comprises the sequence of SEQ ID NO: 2606. In some embodiments, the TRAC guide RNA comprises the sequence of SEQ ID NO: 2613. In some embodiments, the TRAC guide RNA comprises the sequence of SEQ ID NO: 3113. In some embodiments, the TRAC guide RNA comprises the sequence of SEQ ID NO: 3114. In some embodiments, the TRBC guide RNA comprises a sequence selected from SEQ ID NOs: 607, 1607, 2607, and 3115. In some embodiments, the TRBC guide RNA comprises the sequence of SEQ ID NO: 607. In some embodiments, the TRBC guide RNA comprises the sequence of SEQ ID NO: 1607. In some embodiments, the TRBC guide RNA comprises the sequence of SEQ ID NO: 2607. In some embodiments, the TRBC guide RNA comprises the sequence of SEQ ID NO: 3115.

[0675] In some embodiments, edited cells obtained by the multiplex gene editing methods or compositions are provided. In some embodiments, the edited cells comprise a genetic modification in the HLA-A gene, a genetic modification in the HLA-B gene, and a genetic modification in the CIITA gene; and optionally a genetic modification in a gene other than HLA-A, HLA-B, and CIITA, such as TRAC, TRBC1, and/or TRBC2. In some embodiments, the genetic modification in the HLA-A gene comprises at least one nucleotide within the genomic coordinates chosen from: chr6:29942891-29942915; or chr6:29942609-29942633. In some embodiments, the genetic modification in the HLA-A gene comprises at least one nucleotide within the genomic coordinates chr6:29942891-29942915. In some embodiments, the genetic modification in the HLA-A gene comprises at least one nucleotide within the genomic coordinates chr6:29942609-29942633. In some embodiments, the genetic modification in the HLA-B gene comprises at least one nucleotide within the genomic coordinates chosen from: (a) chr6:31355348-31355368; or chr6:31355347-31355367; or (b) chr6:31355221-31355245; chr6:31355222-31355246; chr6:31355205-31355229; chr6:31355446-31355470; chr6:31356425-31356449; or chr6:31355441-31355465. In some embodiments, the genetic modification in the HLA-B gene comprises at least one nucleotide within the genomic coordinates chr6:31355348-31355368. In some embodiments, the genetic modification in the HLA-B gene comprises at least one nucleotide within the genomic coordinates chr6:31355347-31355367. In some embodiments, the genetic modification in the HLA-B gene comprises at least one nucleotide within the genomic coordinates chr6:31355221-31355245. In some embodiments, the genetic modification in the HLA-B gene comprises at least one nucleotide within the genomic coordinates chr6:31355222-31355246. In some embodiments, the genetic modification in the HLA-B gene comprises at least one nucleotide within the genomic coordinates chr6:31355205-31355229. In some embodiments, the genetic modification in the HLA-B gene comprises at least one nucleotide within the genomic coordinates chr6:31355446-31355470. In some embodiments, the genetic modification in the HLA-B gene comprises at least one nucleotide within the genomic coordinates chr6:31356425-31356449. In some embodiments, the genetic modification in the HLA-B gene comprises at least one nucleotide within the genomic coordinates chr6:31355441-31355465. In some embodiments, the genetic modification in the CIITA gene comprises at least one nucleotide within the genomic coordinates chosen from: chr16:10907504-10907528 or chr16:10906643-10906667. In some embodiments, the genetic modification in the CIITA gene comprises at least one nucleotide within the genomic coordinates chr16:10907504-10907528. In some embodiments, the genetic modification in the CIITA gene comprises at least one nucleotide within the genomic coordinates chr16:10906643-10906667. In some embodiments, the genetic modification in the TRAC gene comprises at least one nucleotide within the genomic coordinates chosen from: chr14:22550574-22550598 or chr14:22550544-22550568. In some embodiments, the genetic modification in the TRAC gene comprises at least one nucleotide within the genomic coordinates chr14:22550574-22550598. In some embodiments, the genetic modification in the TRAC gene comprises at least one nucleotide within the genomic coordinates chr14:22550544-22550568. In some embodiments, the genetic modification in the TRBC gene comprises at least one nucleotide within the genomic coordinates chr7:142792690-142792714.

### 1. MHC Class H Knock Out

[0676] In some embodiments, methods for reducing or eliminating surface expression of HLA-B by genetically modifying HLA-B as disclosed herein are provided, wherein the methods and compositions further provide for reducing or eliminating surface expression of MHC class II protein relative to an unmodified cell. In some embodiments, MHC class II protein expression is reduced or eliminated by contacting the cell with a CIITA guide RNA. In some embodiments, the cell is an allogeneic cell. In some embodiments, the cell is homozygous for HLA-A and homozygous for HLA-C.

[0677] In some embodiments, methods for reducing or eliminating surface expression of HLA-A and HLA-B protein by genetically modifying HLA-A and HLA-B genes as disclosed herein are provided, wherein the methods and compositions further provide for reducing or eliminating surface expression of MHC class II protein relative to an unmodified cell. In some embodiments, MHC class II protein expression is reduced or eliminated by contacting the cell with a CIITA guide RNA. In some embodiments, the cell is an allogeneic cell. In some embodiments, the cell is homozygous for HLA-C.

[0678] In some embodiments, methods are provided for reducing surface expression of MHC class II protein on the engineered human cell. MHC class II expression is impacted by a variety of proteins. (See e.g., Crivello et al., Journal Immunology 202:1895-1903 (2019).) For example, the CIITA protein functions as a transcriptional activator (activating the MHC class II promoter) and is essential for MHC class II protein expression. In some embodiments, MHC class II protein expression is reduced or eliminated by genetically modifying a gene selected from: CIITA, HLA-DR, HLA-DQ, HLA-DP, RFX5, RFXB/ANK, RFXAP, CREB, NF-YA, NF-YB, and NF-YC. In some embodiments, MHC class II protein expression is reduced or eliminated by genetically modifying the CIITA gene. In some embodiments, MHC class II protein expression is reduced or eliminated by genetically modifying the HLA-DR gene. In some embodiments, MHC class II protein expression is reduced or eliminated by genetically modifying the HLA-DQ gene. In some embodiments, MHC class II protein expression is reduced or eliminated by genetically modifying the HLA-DP gene. In some embodiments, MHC class II protein expression is reduced or eliminated by genetically modifying the RFX5 gene. In some embodiments, MHC class II protein expression is reduced or eliminated by genetically modifying the RFXB/ANK gene. In some embodiments, MHC class II protein expression is reduced or eliminated by genetically modifying the RFXAP gene. In some embodiments, MHC class II protein expression is reduced or eliminated by genetically modifying the CREB gene. In some embodiments, MHC class II protein expression is reduced or eliminated by genetically modifying the NK-YA gene. In some embodiments, MHC class II protein expression is reduced or eliminated by genetically modifying the NK-YB gene. In some embodiments, MHC class II protein expression is reduced or eliminated by genetically modifying the NK-YC gene.

[0679] In some embodiments, methods are provided for making an engineered human cell which has reduced or eliminated expression of HLA-B protein relative to an unmodified cell, wherein the cell is homozygous for HLA-A and homozygous for HLA-C, further comprising reducing or eliminating the surface expression of MHC class II protein in the cell relative to an unmodified cell. In some embodiments, the methods comprise contacting the cell with a CIITA guide RNA.

[0680] In some embodiments, methods are provided for making an engineered human cell which has reduced or eliminated expression of HLA-A and HLA-B protein relative to an unmodified cell, wherein the cell homozygous for HLA-C, further comprising reducing or eliminating the surface expression of MHC class II protein in the cell relative to an unmodified cell. In some embodiments, the methods comprise contacting the cell with a CIITA guide RNA.

[0681] In some embodiments, the efficacy of a CIITA guide RNA is determined by measuring levels of CIITA protein in a cell. The levels of CIITA protein may be detected by, e.g., cell lysate and western blot with an anti-CIITA antibody. In some embodiments, the efficacy of a CIITA guide RNA is determined by measuring levels of CIITA protein in the cell nucleus. In some embodiments, the efficacy of a CIITA guide RNA is determined by measuring levels of CIITA mRNA in a cell. The levels of CIITA mRNA may be detected by e.g., RT-PCR. In some embodiments, a decrease in the levels CIITA protein or CIITA mRNA in the target cell as compared to an unmodified cell is indicative of an effective CIITA guide RNA.

[0682] In some embodiments, the efficacy of a CIITA guide RNA is determined by measuring the reduction or elimination of MHC class II protein expression by the target cells. The CIITA protein functions as a transactivator, activating the MHC class II promoter, and is essential for the expression of MHC class II protein. In some embodiments, MHC class II protein expression may be detected on the surface of the target cells. In some embodiments, MHC class II protein expression is measured by flow cytometry. In some embodiments, an antibody against MHC class II protein (e.g., anti-HLA-DR, -DQ, -DP) may be used to detect MHC class II protein expression e.g., by flow cytometry. In some embodiments, a reduction or elimination in MHC class II protein on the surface of a cell (or population of cells) as compared to an unmodified cell (or population of unmodified cells) is indicative of an effective CIITA guide RNA. In some embodiments, a cell (or population of cells) that has been contacted with a particular CIITA guide RNA and RNA-guided DNA binding agent that is negative for MHC class II protein by flow cytometry is indicative of an effective CIITA guide RNA.

[0683] In some embodiments, the MHC class II protein expression is reduced or eliminated in a population of cells using the methods and compositions disclosed herein. In some embodiments, the population of cells is enriched (e.g., by FACS or MACS) and is at least 65%, 70%, 80%, 90%, 91%, 92%, 93%, or 94% MHC class II negative as measured by flow cytometry relative to a population of unmodified cells. In some embodiments, the population of cells is not enriched (e.g., by FACS or MACS) and is at least 65%, 70%, 80%, 90%, 91%, 92%, 93%, or 94% MHC class II negative as measured by flow cytometry relative to a population of unmodified cells.

[0684] In some embodiments, the population of cells is at least 65% MHC II negative as measured by flow cytometry relative to a population of unmodified cells. In some embodiments, the population of cells is at least 70% MHC class II negative as measured by flow cytometry relative to a population of unmodified cells. In some embodiments, the population of cells is at least 80% MHC II negative as measured by flow cytometry relative to a population of unmodified cells. In some embodiments, the population of cells is at least 90% MHC class II negative as measured by flow cytometry relative to a population of unmodified cells. In some embodiments, the population of cells is at least 91% MHC class II negative as measured by flow cytometry relative to a population of unmodified cells. In some embodiments, the population of cells is at least 92% MHC II negative as measured by flow cytometry relative to a population of unmodified cells. In some embodiments, the population of cells is at least 93% MHC class II negative as measured by flow cytometry relative to a population of unmodified cells. In some embodiments, the population of cells is at least 94% MHC class II negative as measured by flow cytometry relative to a population of unmodified cells.

[0685] In some embodiments, the population of cells elicits a reduced response from immune cells in vitro or in vivo (e.g., CD4+ T cells). A CD4+ T cell response may be evaluated by an assay that measures the activation response of CD4+ T cells e.g., CD4+ T cell proliferation, expression of activation markers, or cytokine production (IL-2, IL-12, IFN-γ) (e.g., flow cytometry, ELISA). The response of CD4+ T cells may be evaluated in in vitro cell culture assays in which the genetically modified cell is co-cultured with cells comprising CD4+ T cells. For example, the engineered cell may be co-cultured e.g., with PBMCs, purified CD3+ T cells comprising CD4+ T cells, purified CD4+ T cells, or a CD4+ T cell line. The CD4+ T cell response elicited from the engineered cell may be compared to the response elicited from an unmodified cell.

[0686] In some embodiments, an engineered human cell is provided wherein the cell has reduced or eliminated surface expression of HLA-B and MHC class II protein wherein the cell comprises a genetic modification in the HLA-B gene, wherein the cell is homozygous for HLA-A and HLA-C, and wherein the cell comprises a modification in the CIITA gene. In some embodiments, the engineered cell elicits a reduced response from CD4+ T cells and elicits a reduced response from CD8+ T cells.

[0687] In some embodiments, an engineered human cell is provided wherein the cell has reduced or eliminated surface expression of HLA-A, HLA-B, and MHC class II protein, wherein the cell comprises a genetic modification in the HLA-A and HLA-B genes, wherein the cell is homozygous for HLA-C, and wherein the cell comprises a modification in the CIITA gene. In some embodiments, the engineered cell elicits a reduced response from CD4+ T cells and elicits a reduced response from CD8+ T cells.

### 2. Exogenous Nucleic Acids Knock in

[0688] In some embodiments, the present disclosure provides methods and compositions for reducing or eliminating surface expression of HLA-B protein by genetically modifying HLA-B as disclosed herein, wherein the methods and compositions further provide for expression of a protein encoded by an exogenous nucleic acid (e.g., an antibody, chimeric antigen receptor (CAR), T cell receptor (TCR), cytokine or cytokine receptor, chemokine or chemokine receptor, enzyme, fusion protein, or other type of cell-surface bound or soluble polypeptide). In some embodiments, the exogenous nucleic acid encodes a protein that is expressed on the cell surface. For example, in some embodiments, the exogenous nucleic acid encodes a targeting receptor expressed on the cell surface (described further herein). In some embodiments, the genetically modified cell may function as a “cell factory” for the expression of a secreted polypeptide encoded by an exogenous nucleic acid, including e.g., as a source for continuous production of a polypeptide in vivo (as described further herein). In some embodiments, the cell is an allogeneic cell. In some embodiments, the cell is homozygous for HLA-A and homozygous for HLA-C.

[0689] In some embodiments, the present disclosure provides methods and compositions for reducing or eliminating surface expression of HLA-A and HLA-B protein by genetically modifying HLA-A and HLA-B as disclosed herein, wherein the methods and compositions further provide for expression of a protein encoded by an exogenous nucleic acid (e.g., an antibody, chimeric antigen receptor (CAR), T cell receptor (TCR), cytokine or cytokine receptor, chemokine or chemokine receptor, enzyme, fusion protein, or other type of cell-surface bound or soluble polypeptide). In some embodiments, the exogenous nucleic acid encodes a protein that is expressed on the cell surface. For example, in some embodiments, the exogenous nucleic acid encodes a targeting receptor expressed on the cell surface (described further herein). In some embodiments, the targeting receptor is a CAR. In some embodiments, the targeting receptor is a universal CAR. In some embodiments, the targeting receptor is an anti-CD30 CAR. In some embodiments, the anti-CD30 CAR is any one of the anti-CD30 CARs disclosed in International Application No. PCT/US2023/018946, the content of which is incorporated herein by reference. In some embodiments, the genetically modified cell may function as a “cell factory” for the expression of a secreted polypeptide encoded by an exogenous nucleic acid, including e.g., as a source for continuous production of a polypeptide in vivo (as described further herein). In some embodiments, the cell is an allogeneic cell. In some embodiments, the cell is homozygous for HLA-C.

[0690] In some embodiments, the methods comprise reducing surface expression of HLA-B protein comprising genetically modifying the HLA-B gene comprising contacting the cell with a composition comprising an HLA-B guide RNA disclosed herein, the method further comprising contacting the cell with an exogenous nucleic acid.

[0691] In some embodiments, the methods comprise reducing surface expression of HLA-A and HLA-B protein comprising genetically modifying the HLA-A and HLA-B genes comprising contacting the cell with a first composition comprising an HLA-A guide RNA disclosed herein and a second composition comprising an HLA-B guide RNA disclosed herein, the method further comprising contacting the cell with an exogenous nucleic acid.

[0692] In some embodiments, the methods comprise reducing or eliminating surface expression of HLA-B protein, comprising genetically modifying the cell with one or more compositions comprising an HLA-B guide RNA as disclosed herein, an exogenous nucleic acid encoding a polypeptide (e.g., a targeting receptor), and an RNA-guided DNA binding agent or a nucleic acid encoding an RNA-guided DNA binding agent.

[0693] In some embodiments, the methods comprise reducing or eliminating surface expression of HLA-A and HLA-B protein, comprising genetically modifying the cell with one or more compositions comprising a first composition comprising an HLA-A guide RNA as disclosed herein, a second composition comprising an HLA-B guide RNA as disclosed herein, an exogenous nucleic acid encoding a polypeptide (e.g., a targeting receptor), and one or more RNA-guided DNA binding agent or a nucleic acid encoding an RNA-guided DNA binding agent.

[0694] In some embodiments, the methods comprise reducing or eliminating surface expression of HLA-B protein and MHC class II protein, comprising genetically modifying the cell with one or more compositions comprising a HLA-B guide RNA as disclosed herein, a CIITA guide RNA, an exogenous nucleic acid encoding a polypeptide (e.g., a targeting receptor), and an RNA-guided DNA binding agent or a nucleic acid encoding an RNA-guided DNA binding agent.

[0695] In some embodiments, the methods comprise reducing or eliminating surface expression of HLA-A and HLA-B protein and MHC class II protein, comprising genetically modifying the cell with one or more compositions comprising a first composition comprising an HLA-A guide RNA as disclosed herein, a second composition comprising an HLA-B guide RNA as disclosed herein, a CIITA guide RNA, an exogenous nucleic acid encoding a polypeptide (e.g., a targeting receptor), and one or more RNA-guided DNA binding agent or a nucleic acid encoding an RNA-guided DNA binding agent.

[0696] In some embodiments, the exogenous nucleic acid encodes a polypeptide that is expressed on the surface of the cell. In some embodiments, the exogenous nucleic acid encodes a soluble polypeptide. As used herein, “soluble” polypeptide refers to a polypeptide that is secreted by the cell. In some embodiments, the soluble polypeptide is a therapeutic polypeptide. In some embodiments, the soluble polypeptide is an antibody. In some embodiments, the soluble polypeptide is an enzyme. In some embodiments, the soluble polypeptide is a cytokine. In some embodiments, the soluble polypeptide is a chemokine. In some embodiments, the soluble polypeptide is a fusion protein.

[0697] In some embodiments, the exogenous nucleic acid encodes an antibody. In some embodiments, the exogenous nucleic acid encodes an antibody fragment (e.g., Fab, Fab2). In some embodiments, the exogenous nucleic acid encodes is a full-length antibody. In some embodiments, the exogenous nucleic acid encodes is a single-chain antibody (e.g., scFv). In some embodiments, the antibody is an IgG, IgM, IgD, IgA, or IgE. In some embodiments, the antibody is an IgG antibody. In some embodiments, the antibody is an IgG1 antibody. In some embodiments, the antibody is an IgG4 antibody. In some embodiments, the heavy chain constant region contains mutations known to reduce effector functions. In some embodiments, the heavy chain constant region contains mutations known to enhance effector functions. In some embodiments, the antibody is a bispecific antibody. In some embodiments, the antibody is a single-domain antibody (e.g., VH domain-only antibody).

[0698] In some embodiments, the exogenous nucleic acid encodes a neutralizing antibody. A neutralizing antibody neutralizes the activity of its target antigen. In some embodiments, the antibody is a neutralizing antibody against a virus antigen. In some embodiments, the antibody neutralizes a target viral antigen, blocking the ability of the virus to infect a cell. In some embodiments, a cell-based neutralization assay may be used to measure the neutralizing activity of an antibody. The particular cells and readout will depend on the target antigen of the neutralizing antibody. The half maximal effective concentration (EC₅₀) of the antibody can be measured in a cell-based neutralization assay, wherein a lower EC₅₀ is indicative of more potent neutralizing antibody.

[0699] In some embodiments, the exogenous nucleic acid encodes an antibody that binds to an antigen associated with a disease or disorder (see e.g., diseases and disorders described in Section IV).

[0700] In some embodiments, the exogenous nucleic acid encodes a polypeptide that is expressed on the surface of the cell (i.e., a cell-surface bound protein). In some embodiments, the exogenous nucleic acid encodes a targeting receptor. A “targeting receptor” is a receptor present on the surface of a cell, e.g., a T cell, to permit binding of the cell to a target site, e.g., a specific cell or tissue in an organism. In some embodiments, the targeting receptor is a CAR. In some embodiments, the targeting receptor is a universal CAR (UniCAR). In some embodiments, the targeting receptor is a proliferation-inducing ligand (APRIL). In some embodiments, the targeting receptor is a TCR. In some embodiments, the targeting receptor is a TRuC. In some embodiments, the targeting receptor is a B cell receptor (BCR) (e.g., expressed on a B cell). In some embodiments, the targeting receptor is chemokine receptor. In some embodiments, the targeting receptor is a cytokine receptor.

[0701] In some embodiments, targeting receptors include a chimeric antigen receptor (CAR), a T-cell receptor (TCR), and a receptor for a cell surface molecule operably linked through at least a transmembrane domain in an internal signaling domain capable of activating a T cell upon binding of the extracellular receptor portion. In some embodiments, a CAR refers to an extracellular antigen recognition domain, e.g., an scFv, VHH, nanobody; operably linked to an intracellular signaling domain, which activates the T cell when an antigen is bound. CARs are composed of four regions: an antigen recognition domain, an extracellular hinge region, a transmembrane domain, and an intracellular T-cell signaling domain. Such receptors are well known in the art (see, e.g., WO2020092057, WO2019191114, WO2019147805, WO2018208837). A universal CAR (UniCAR) for recognizing various antigens (see, e.g., EP 2 990 416 A1) and a reversed universal CAR (RevCAR) that promotes binding of an immune cell to a target cell through an adaptor molecule (see, e.g., WO2019238722) are also contemplated. CARs can be targeted to any antigen to which an antibody can be developed and are typically directed to molecules displayed on the surface of a cell or tissue to be targeted. In some embodiments, the targeting receptor comprises an antigen recognition domain (e.g., a cancer antigen recognition domain and a subunit of a TCR (e.g., a TRuC). (See Baeuerle et al. Nature Communications 2087 (2019).)

[0702] In some embodiments, the exogenous nucleic acid encodes a TCR. In some embodiments, the exogenous nucleic acid encodes a genetically modified TCR. In some embodiments, the exogenous nucleic acid encodes is a genetically modified TCR with specificity for a polypeptide expressed by cancer cells. In some embodiments, the exogenous nucleic acid encodes a targeting receptor specific for Wilms' tumor gene (WT1) antigen. In some embodiments, the exogenous nucleic acid encodes the WT1-specific TCR (see e.g., WO2020/081613A1).

[0703] In some embodiments, an exogenous nucleic acid is inserted into the genome of the target cell. In some embodiments, the exogenous nucleic acid is integrated into the genome of the target cell. In some embodiments, the exogenous nucleic acid is integrated into the genome of the target cell by homologous recombination (HR). In some embodiments, the exogenous nucleic acid is integrated into the genome of the target cell by blunt end insertion. In some embodiments, the exogenous nucleic acid is integrated into the genome of the target cell by non-homologous end joining. In some embodiments, the exogenous nucleic acid is integrated into a safe harbor locus in the genome of the cell. In some embodiments, the exogenous nucleic acid is integrated into one of the TRAC locus, B2M locus, AAVS1 locus, or CIITA locus. In some embodiments, the lipid nucleic acid assembly composition is a lipid nanoparticle (LNP).

[0704] In some embodiments, the methods produce a composition comprising an engineered cell having reduced or eliminated surface expression of HLA-B protein and comprising an exogenous nucleic acid. In some embodiments, the methods produce a composition comprising an engineered cell having reduced or eliminated surface expression of HLA-B protein and that secretes or expresses a polypeptide encoded by an exogenous nucleic acid integrated into the genome of the cell. In some embodiments, the methods produce a composition comprising an engineered cell having reduced or eliminated surface expression of HLA-B protein, or reduced or eliminated HLA-B levels in the cell nucleus, and having reduced or eliminated surface expression of MHC class II protein expression, and secreting or expressing a polypeptide encoded by an exogenous nucleic acid integrated into the genome of the cell. In some embodiments, the engineered cell elicits a reduced response from CD4+ T cells, or CD8+ T cells.

[0705] In some embodiments, the methods produce a composition comprising an engineered cell having reduced or eliminated surface expression of HLA-A and HLA-B protein and comprising an exogenous nucleic acid. In some embodiments, the methods produce a composition comprising an engineered cell having reduced or eliminated surface expression of HLA-A and HLA-B protein and that secretes or expresses a polypeptide encoded by an exogenous nucleic acid integrated into the genome of the cell. In some embodiments, the methods produce a composition comprising an engineered cell having reduced or eliminated surface expression of HLA-A and HLA-B protein, or reduced or eliminated HLA-A and HLA-B levels in the cell nucleus, and having reduced surface expression of MHC class II protein, and secreting or expressing a polypeptide encoded by an exogenous nucleic acid integrated into the genome of the cell. In some embodiments, the engineered cell elicits a reduced response from CD4+ T cells, or CD8+ T cells.

[0706] In some embodiments, an allogeneic cell is provided wherein the cell has reduced or eliminated surface expression of MHC class II and HLA-B protein, wherein the cell comprises a modification in the HLA-B gene as disclosed herein, wherein the cell comprises a modification in the CIITA gene, and wherein the cell further comprises an exogenous nucleic acid encoding a polypeptide (e.g., a targeting receptor).

[0707] In some embodiments, an allogeneic cell is provided wherein the cell has reduced or eliminated surface expression of MHC class II, HLA-A, and HLA-B protein, wherein the cell comprises a modification in the HLA-A and HLA-B gene as disclosed herein, wherein the cell comprises a modification in the CIITA gene, and wherein the cell further comprises an exogenous nucleic acid encoding a polypeptide (e.g., a targeting receptor).

[0708] In some embodiments, the present disclosure provides methods for reducing or eliminating surface expression of HLA-B protein by genetically modifying HLA-B as disclosed herein, wherein the methods further provide for reducing expression of one or more additional target genes (e.g., TRAC, TRBC). In some embodiments, the additional genetic modifications provide further advantages for use of the genetically modified cells for adoptive cell transfer applications. In some embodiments, the cell is an allogeneic cell. In some embodiments, the cell is homozygous for HLA-A and homozygous for HLA-C.

[0709] In some embodiments, the present disclosure provides methods for reducing or eliminating surface expression of HLA-A and HLA-B protein by genetically modifying HLA-A and HLA-B as disclosed herein, wherein the methods further provide for reducing expression of one or more additional target genes (e.g., TRAC, TRBC). In some embodiments, the additional genetic modifications provide further advantages for use of the genetically modified cells for adoptive cell transfer applications. In some embodiments, the cell is an allogeneic cell. In some embodiments, the cell is homozygous for HLA-C.

[0710] In some embodiments, the methods comprise reducing or eliminating surface expression of HLA-B protein, comprising genetically modifying the cell with one or more compositions comprising a HLA-B guide RNA as disclosed herein, a CIITA guide RNA, an exogenous nucleic acid encoding polypeptide (e.g., a targeting receptor), a guide RNA that directs an RNA-guided DNA binding agent to a target sequence located in an another gene, thereby reducing or eliminating expression of the other gene, and an RNA-guided DNA binding agent or a nucleic acid encoding an RNA-guided DNA binding agent. In some embodiments, the additional target gene is TRAC. In some embodiments, the additional target gene is TRBC.

[0711] In some embodiments, the methods comprise reducing or eliminating surface expression of HLA-A and HLA-B protein, comprising genetically modifying the cell with one or more compositions comprising a HLA-B guide RNA as disclosed herein, a CIITA guide RNA, an exogenous nucleic acid encoding polypeptide (e.g., a targeting receptor), a guide RNA that directs an RNA-guided DNA binding agent to a target sequence located in an another gene, thereby reducing or eliminating expression of the other gene, and an RNA-guided DNA binding agent or a nucleic acid encoding an RNA-guided DNA binding agent. In some embodiments, the additional target gene is TRAC. In some embodiments, the additional target gene is TRBC.

[0712] In some embodiments, the method disclosed herein further comprises contacting the cell with a DNA-dependent protein kinase inhibitor (DNAPK), optionally wherein the DNAPKi is Compound 1 or “DNAPKI Compound 1”: 9-(4,4-difluorocyclohexyl)-7-methyl-2-((7-methyl-[1,2,4]triazolo[1,5-a]pyridin-6-yl)amino)-7,9-dihydro-8H-purin-8-one, also depicted as:

[chemical structure]

### E. Exemplary Cell Types

[0713] In some embodiments, methods and compositions disclosed herein genetically modify a human cell. In some embodiments, the cell is an allogeneic cell. In some embodiments the genetically modified cell is referred to as an engineered cell. An engineered cell refers to a cell (or progeny of a cell) comprising an engineered genetic modification, e.g. that has been contacted with a gene editing system and genetically modified by the gene editing system. The terms “engineered cell” and “genetically modified cell” are used interchangeably throughout. The engineered human cell may be any of the exemplary cell types disclosed herein. Further, because MHC class I molecules are expressed on all nucleated cells, the engineered human cell may be any nucleated cell.

[0714] In some embodiments, when the cell is homozygous for HLA-A, the HLA-A allele is selected from any one of the following HLA-A alleles: HLA-A*02:01; HLA-A*01:01; HLA-A*03:01; HLA-A*11:01; HLA-A*26:01; HLA-A*68:01; HLA-A*29:02; HLA-A*31:01; HLA-A*32:01; HLA-A*30:02; HLA-A*25:01; HLA-A*33:01; HLA-A*02:02; HLA-A*74:01; HLA-A*02:02; HLA-A*29:01; HLA-A*02:03; HLA-A*02:05; HLA-A*24:07; HLA-A*11:02; HLA-A*36:01; HLA-A*02:22; HLA-A*34:02; HLA-A*01:03; HLA-A*24:02; HLA-A*02:07; HLA-A*23:01; HLA-A*30:01; HLA-A*33:03; HLA-A*02:06; HLA-A*34:02; and HLA-A*68:02.

[0715] In some embodiments, when the cell is homozygous for HLA-C, the HLA-C allele is selected from any one of the following HLA-C alleles: HLA-C*07:02; HLA-C*07:01; HLA-C*05:01; HLA-C*04:01 HLA-C*03:04; HLA-C*06:02; HLA-C*08:02; HLA-C*08:01; HLA-C*03:02; HLA-C*16:01; HLA-C*15:02; HLA-C*03:04; HLA-C*12:03; HLA-C*02:10; HLA-C*05:01; HLA-C*12:02; HLA-C*14:02; HLA-C*04:01; HLA-C*03:03; HLA-C*07:04; HLA-C*17:01; HLA-C*01:02; and HLA-C*02:02.

[0716] In some embodiments, when the cell is homozygous for HLA-C, the HLA-C allele is HLA-C*03:04. In some embodiments, when the cell is homozygous for HLA-C, the HLA-C allele is HLA-C*06:02. In some embodiments, when the cell is homozygous for HLA-C, the HLA-C allele is HLA-C*01:02. In some embodiments, when the cell is homozygous for HLA-C, the HLA-C allele is HLA-C*08:01. In some embodiments, when the cell is homozygous for HLA-C, the HLA-C allele is HLA-C*03:02.

[0717] In some embodiments, when the cell is homozygous for HLA-A and homozygous for HLA-C, and the HLA-A allele is selected from any one of the following HLA-A alleles: HLA-A*02:01; HLA-A*01:01; HLA-A*03:01; HLA-A*11:01; HLA-A*26:01; HLA-A*68:01; HLA-A*29:02; HLA-A*31:01; HLA-A*32:01; HLA-A*30:02; HLA-A*25:01; HLA-A*33:01; HLA-A*02:02; HLA-A*74:01; HLA-A*02:02; HLA-A*29:01; HLA-A*02:03; HLA-A*02:05; HLA-A*24:07; HLA-A*11:02; HLA-A*36:01; HLA-A*02:22; HLA-A*34:02; HLA-A*01:03; HLA-A*24:02; HLA-A*02:07; HLA-A*23:01; HLA-A*30:01; HLA-A*33:03; HLA-A*02:06; HLA-A*34:02; and HLA-A*68:02; and the HLA-C allele is selected from any one of the following HLA-C alleles: HLA-C*07:02; HLA-C*07:01; HLA-C*05:01; HLA-C*04:01 HLA-C*03:04; HLA-C*06:02; HLA-C*08:02; HLA-C*08:01; HLA-C*03:02; HLA-C*16:01; HLA-C*15:02; HLA-C*03:04; HLA-C*12:03; HLA-C*02:10; HLA-C*05:01; HLA-C*12:02; HLA-C*14:02; HLA-C*04:01; HLA-C*03:03; HLA-C*07:04; HLA-C*17:01; HLA-C*01:02; and HLA-C*02:02.

[0718] In some embodiments, when the cell is homozygous for HLA-A and homozygous for HLA-C, and the HLA-A and HLA-C alleles are selected from any one of the following HLA-A and HLA-C alleles: HLA-A*01:01 and HLA-C*07:01; HLA-A*02:01 and HLA-C*07:02; HLA-A*02:01 and HLA-C*05:01; HLA-A*03:01 and HLA-C*07:02; HLA-A*02:01 and HLA-C*04:01; HLA-A*02:01 and HLA-C*03:04; HLA-A*01:01 and HLA-C*06:02; HLA-A*03:01 and HLA-C*04:01; HLA-A*02:01 and HLA-C*07:01; HLA-A*24:02 and HLA-C*04:01; HLA-A*29:02 and HLA-C*16:01; HLA-A*02:01 and HLA-C*06:02; HLA-A*24:02 and HLA-C*07:02; HLA-A*26:01 and HLA-C*12:03; HLA-A*11:01 and HLA-C*04:01; HLA-A*25:01 and HLA-C*12:03; HLA-A*02:01 and HLA-C*02:02; HLA-A*24:02 and HLA-C*03:03; HLA-A*30:01 and HLA-C*06:02; HLA-A*02:01 and HLA-C*01:02; HLA-A*11:01 and HLA-C*07:02; HLA-A*03:01 and HLA-C*07:01; HLA-A*23:01 and HLA-C*04:01; HLA-A*24:02 and HLA-C*07:01; HLA-A*31:01 and HLA-C*03:04; HLA-A*33:01 and HLA-C*08:02; HLA-A*02:01 and HLA-C*03:03; HLA-A*11:01 and HLA-C*01:02; HLA-A*01:01 and HLA-C*04:01; HLA-A*03:01 and HLA-C*06:02.

[0719] In some embodiments, the cell is homozygous for HLA-A and homozygous for HLA-C. In some embodiments, the HLA-A and HLA-C alleles are HLA-A*01:01 and HLA-C*07:01. In some embodiments, the HLA-A and HLA-C alleles are HLA-A*02:01 and HLA-C*07:02. In some embodiments, the HLA-A and HLA-C alleles are HLA-A*02:01 and HLA-C*05:01. In some embodiments, the HLA-A and HLA-C alleles are HLA-A*03:01 and HLA-C*07:02. In some embodiments, the HLA-A and HLA-C alleles are HLA-A*02:01 and HLA-C*04:01. In some embodiments, the HLA-A and HLA-C alleles are HLA-A*02:01 and HLA-C*03:04. In some embodiments, the HLA-A and HLA-C alleles are HLA-A*01:01 and HLA-C*06:02. In some embodiments, the HLA-A and HLA-C alleles are HLA-A*03:01 and HLA-C*04:01. In some embodiments, the HLA-A and HLA-C alleles are HLA-A*02:01 and HLA-C*07:01. In some embodiments, the HLA-A and HLA-C alleles are HLA-A*24:02 and HLA-C*04:01. In some embodiments, the HLA-A and HLA-C alleles are HLA-A*29:02 and HLA-C*16:01. In some embodiments, the HLA-A and HLA-C alleles are HLA-A*02:01 and HLA-C*06:02. In some embodiments, the HLA-A and HLA-C alleles are HLA-A*24:02 and HLA-C*07:02. In some embodiments, the HLA-A and HLA-C alleles are HLA-A*26:01 and HLA-C*12:03. In some embodiments, the HLA-A and HLA-C alleles are HLA-A*11:01 and HLA-C*04:01. In some embodiments, the HLA-A and HLA-C alleles are HLA-A*25:01 and HLA-C*12:03. In some embodiments, the HLA-A and HLA-C alleles are HLA-A*02:01 and HLA-C*02:02. In some embodiments, the HLA-A and HLA-C alleles are HLA-A*24:02 and HLA-C*03:03. In some embodiments, the HLA-A and HLA-C alleles are HLA-A*30:01 and HLA-C*06:02. In some embodiments, the HLA-A and HLA-C alleles are HLA-A*02:01 and HLA-C*01:02. In some embodiments, the HLA-A and HLA-C alleles are HLA-A*11:01 and HLA-C*07:02. In some embodiments, the HLA-A and HLA-C alleles are HLA-A*03:01 and HLA-C*07:01. In some embodiments, the HLA-A and HLA-C alleles are HLA-A*23:01 and HLA-C*04:01. In some embodiments, the HLA-A and HLA-C alleles are HLA-A*24:02 and HLA-C*07:01. In some embodiments, the HLA-A and HLA-C alleles are HLA-A*31:01 and HLA-C*03:04. In some embodiments, the HLA-A and HLA-C alleles are HLA-A*33:01 and HLA-C*08:02. In some embodiments, the HLA-A and HLA-C alleles are HLA-A*02:01 and HLA-C*03:03. In some embodiments, the HLA-A and HLA-C alleles are HLA-A*11:01 and HLA-C*01:02. In some embodiments, the HLA-A and HLA-C alleles are HLA-A*01:01 and HLA-C*04:01; HLA-A*03:01 and HLA-C*06:02.

[0720] In some embodiments, the cell is an immune cell. As used herein, “immune cell” refers to a cell of the immune system, including e.g., a lymphocyte (e.g., T cell, B cell, natural killer cell (“NK cell”, and NKT cell, or iNKT cell)), monocyte, macrophage, mast cell, dendritic cell, or granulocyte (e.g., neutrophil, eosinophil, and basophil). In some embodiments, the cell is a primary immune cell. In some embodiments, the immune system cell may be selected from CD3+, CD4+ and CD8+ T cells, regulatory T cells (Tregs), B cells, NK cells, and dendritic cells (DC). In some embodiments, the immune cell is allogeneic.

[0721] In some embodiments, the cell is a lymphocyte. In some embodiments, the cell is an adaptive immune cell. In some embodiments, the cell is a T cell. In some embodiments, the cell is a B cell. In some embodiments, the cell is a NK cell. In some embodiments, the cell is a macrophage. In some embodiments, the lymphocyte is allogeneic.

[0722] As used herein, a T cell can be defined as a cell that expresses a T cell receptor (“TCR” or “αβ TCR” or “γδ TCR”), however in some embodiments, the TCR of a T cell may be genetically modified to reduce its expression (e.g., by genetic modification to the TRAC or TRBC genes), therefore expression of the protein CD3 may be used as a marker to identify a T cell by standard flow cytometry methods. CD3 is a multi-subunit signaling complex that associates with the TCR. Thus, a T cell may be referred to as CD3+. In some embodiments, a T cell is a cell that expresses a CD3+ marker and either a CD4+ or CD8+ marker. In some embodiments, the T cell is allogeneic.

[0723] In some embodiments, the T cell expresses the glycoprotein CD8 and therefore is CD8+ by standard flow cytometry methods and may be referred to as a “cytotoxic” T cell. In some embodiments, the T cell expresses the glycoprotein CD4 and therefore is CD4+ by standard flow cytometry methods and may be referred to as a “helper” T cell. CD4+ T cells can differentiate into subsets and may be referred to as a Th1 cell, Th2 cell, Th9 cell, Th17 cell, Th22 cell, T regulatory (“Treg”) cell, or T follicular helper cells (“Tfh”). Each CD4+ subset releases specific cytokines that can have either proinflammatory or anti-inflammatory functions, survival or protective functions. A T cell may be isolated from a subject by CD4+ or CD8+ selection methods.

[0724] In some embodiments, the T cell is a memory T cell. In the body, a memory T cell has encountered antigen. A memory T cell can be located in the secondary lymphoid organs (central memory T cells) or in recently infected tissue (effector memory T cells). A memory T cell may be a CD8+ T cell. A memory T cell may be a CD4+ T cell.

[0725] As used herein, a “central memory T cell” can be defined as an antigen-experienced T cell, and for example, may expresses CD62L and CD45RO. A central memory T cell may be detected as CD62L+ and CD45RO+ by Central memory T cells also express CCR7, therefore may be detected as CCR7+ by standard flow cytometry methods.

[0726] As used herein, an “early stem-cell memory T cell” (or “Tscm”) can be defined as a T cell that expresses CD27 and CD45RA, and therefore is CD27+ and CD45RA+ by standard flow cytometry methods. A Tscm does not express the CD45 isoform CD45RO, therefore a Tscm will further be CD45RO− if stained for this isoform by standard flow cytometry methods. A CD45RO− CD27+ cell is therefore also an early stem-cell memory T cell. Tscm cells further express CD62L and CCR7, therefore may be detected as CD62L+ and CCR7+ by standard flow cytometry methods. Early stem-cell memory T cells have been shown to correlate with increased persistence and therapeutic efficacy of cell therapy products.

[0727] In some embodiments, the cell is a B cell. As used herein, a “B cell” can be defined as a cell that expresses CD19 or CD20, or B cell mature antigen (“BCMA”), and therefore a B cell is CD19+, or CD20+, or BCMA+ by standard flow cytometry methods. A B cell is further negative for CD3 and CD56 by standard flow cytometry methods. The B cell may be a plasma cell. The B cell may be a memory B cell. The B cell may be a naïve B cell. The B cell may be IgM+ or may have a class-switched B cell receptor (e.g., IgG+, or IgA+). In some embodiments, the B cell is allogeneic.

[0728] In some embodiments, the cell is a mononuclear cell, such as from bone marrow or peripheral blood. In some embodiments, the cell is a peripheral blood mononuclear cell (“PBMC”). In some embodiments, the cell is a PBMC, e.g. a lymphocyte or monocyte. In some embodiments, the cell is a peripheral blood lymphocyte (“PBL”). In some embodiments, the mononuclear cell is allogeneic.

[0729] Cells used in ACT or tissue regenerative therapy are included, such as stem cells, progenitor cells, and primary cells. Stem cells, for example, include pluripotent stem cells (PSCs); induced pluripotent stem cells (iPSCs); embryonic stem cells (ESCs); mesenchymal stem cells (MSCs, e.g., isolated from bone marrow (BM), peripheral blood (PB), placenta, umbilical cord (UC) or adipose); hematopoietic stem cells (HSCs; e.g. isolated from BM or UC); neural stem cells (NSCs); tissue specific progenitor stem cells (TSPSCs); and limbal stem cells (LSCs). Progenitor and primary cells include mononuclear cells (MNCs, e.g., isolated from BM or PB); endothelial progenitor cells (EPCs, e.g. isolated from BM, PB, and UC); neural progenitor cells (NPCs); and tissue-specific primary cells or cells derived therefrom (TSCs) including chondrocytes, myocytes, and keratinocytes. Cells for organ or tissue transplantations such as islet cells, cardiomyocytes, thyroid cells, thymocytes, neuronal cells, skin cells, and retinal cells are also included.

[0730] In some embodiments, the human cell is isolated from a human subject. In some embodiments, the cell is isolated from human donor PBMCs or leukopaks. In some embodiments, the cell is from a subject with a condition, disorder, or disease. In some embodiments, the cell is from a human donor with Epstein Barr Virus (“EBV”).

[0731] In some embodiments, the methods are carried out ex vivo. As used herein, “ex vivo” refers to an in vitro method wherein the cell is capable of being transferred into a subject, e.g. as an ACT therapy. In some embodiments, an ex vivo method is an in vitro method involving an ACT therapy cell or cell population.

[0732] In some embodiments, the cell is from a cell line. In some embodiments, the cell line is derived from a human subject. In some embodiments, the cell line is a lymphoblastoid cell line (“LCL”). The cell may be cryopreserved and thawed. The cell may not have been previously cryopreserved.

[0733] In some embodiments, the cell is from a cell bank. In some embodiments, the cell is genetically modified and then transferred into a cell bank. In some embodiments the cell is removed from a subject, genetically modified ex vivo, and transferred into a cell bank. In some embodiments, a genetically modified population of cells is transferred into a cell bank. In some embodiments, a genetically modified population of immune cells is transferred into a cell bank. In some embodiments, a genetically modified population of immune cells comprising a first and second subpopulations, wherein the first and second sub-populations have at least one common genetic modification and at least one different genetic modification are transferred into a cell bank.

### F. Exemplary Gene Editing Systems

[0734] Various suitable gene editing systems may be used to make the engineered cells disclosed herein, including but not limited to the CRISPR/Cas system; zinc finger nuclease (ZFN) system; and the transcription activator-like effector nuclease (TALEN) system. Generally, the gene editing systems involve the use of engineered cleavage systems to induce a double strand break (DSB) or a nick (e.g., a single strand break, or SSB) in a target DNA sequence. Cleavage or nicking can occur through the use of specific nucleases such as engineered ZFN, TALENs, or using the CRISPR/Cas system with an engineered guide RNA to guide specific cleavage or nicking of a target DNA sequence. Further, targeted nucleases are being developed based on the Argonaute system (e.g., from T. thermophilus, known as ‘TtAgo’, see Swarts et al (2014) Nature 507(7491): 258-261), which also may have the potential for uses in gene editing and gene therapy.

[0735] In some embodiments, the gene editing system is a TALEN system. Transcription activator-like effector nucleases (TALEN) are restriction enzymes that can be engineered to cut specific sequences of DNA. They are made by fusing a TAL effector DNA-binding domain to a DNA cleavage domain (a nuclease which cuts DNA strands). Transcription activator-like effectors (TALEs) can be engineered to bind to a desired DNA sequence, to promote DNA cleavage at specific locations (see, e.g., Boch, 2011, Nature Biotech). The restriction enzymes can be introduced into cells, for use in gene editing or for gene editing in situ, a technique known as gene editing with engineered nucleases. Such methods and compositions for use therein are known in the art. See, e.g., WO2019147805, WO2014040370, WO2018073393, the contents of which are hereby incorporated in their entireties.

[0736] In some embodiments, the gene editing system is a zinc-finger system. Zinc-finger nucleases (ZFNs) are artificial restriction enzymes generated by fusing a zinc finger DNA-binding domain to a DNA-cleavage domain. Zinc finger domains can be engineered to target specific desired DNA sequences to enables zinc-finger nucleases to target unique sequences within complex genomes. The non-specific cleavage domain from the type IIs restriction endonuclease FokI is typically used as the cleavage domain in ZFNs. Cleavage is repaired by endogenous DNA repair machinery, allowing ZFN to precisely alter the genomes of higher organisms. Such methods and compositions for use therein are known in the art. See, e.g., WO2011091324, the contents of which are hereby incorporated in their entireties.

[0737] In some embodiments, the gene editing system is a CRISPR/Cas system, including e.g., a CRISPR guide RNA comprising a guide sequence and RNA-guided DNA binding agent, and described further herein.

[0738] As used herein, an “RNA-guided DNA binding agent” means a polypeptide or complex of polypeptides having RNA and DNA binding activity, or a DNA-binding subunit of such a complex, wherein the DNA binding activity is sequence-specific and depends on the presence of a PAM and the sequence of the guide RNA. Exemplary RNA-guided DNA binding agents include Cas cleavases/nickases and inactivated forms thereof (“dCas DNA binding agents”). “Cas nuclease”, as used herein, encompasses Cas cleavases, Cas nickases, and dCas DNA binding agents. The dCas DNA binding agent may be a dead nuclease comprising non-functional nuclease domains (RuvC or HNH domain). In some embodiments the Cas cleavase or Cas nickase encompasses a dCas DNA binding agent modified to permit DNA cleavage, e.g. via fusion with a FokI domain. Cas cleavases/nickases and dCas DNA binding agents include a Csm or Cmr complex of a type III CRISPR system, the Cas10, Csm1, or Cmr2 subunit thereof, a Cascade complex of a type I CRISPR system, the Cas3 subunit thereof, and Class 2 Cas nucleases.

[0739] As used herein, a “Class 2 Cas nuclease” is a single-chain polypeptide with RNA-guided DNA binding activity. Class 2 Cas nucleases include Class 2 Cas cleavases/nickases (e.g., H840A or D10A variants of Spy Cas9 and D16A and H588A of Nine Cas9, e.g., Nme2 Cas9), which further have RNA-guided DNA cleavases or nickase activity, and Class 2 dCas DNA binding agents, in which cleavase/nickase activity is inactivated. Class 2 Cas nucleases include, for example, Cas9, Cpf1, C2c1, C2c2, C2c3, HF Cas9 (e.g., N497A, R661A, Q695A, Q926A variants), HypaCas9 (e.g., N692A, M694A, Q695A, H698A variants), eSPCas9(1.0) (e.g., K810A, K1003A, R1060A variants), and eSPCas9(1.1) (e.g., K848A, K1003A, R1060A variants) proteins and modifications thereof. Cpf1 protein, Zetsche et al., Cell, 163: 1-13 (2015), is homologous to Cas9, and contains a RuvC-like nuclease domain. Cpf1 sequences of Zetsche are incorporated by reference in their entirety. See, e.g., Zetsche, Tables S1 and S3. See, e.g., Makarova et al., Nat Rev Microbiol, 13(11): 722-36 (2015); Shmakov et al., Molecular Cell, 60:385-397 (2015).

[0740] In some embodiments the gene editing system comprises a base editor comprising a deaminase and an RNA-guided nickase. In some embodiments the gene editing system comprises a base editor comprising a cytidine deaminase and an RNA-guided nickase. In some embodiments, the gene editing system comprises a DNA polymerase. Further description of the gene editing system methods and compositions for use therein are known in the art. See e.g., WO2019/067910, WO2021/188840A1, WO2019/051097, and PCT/US2021/062922 filed Dec. 10, 2021, and U.S. Provisional Application No. 63/275,425 filed Nov. 3, 2021, the contents of each of which are hereby incorporated in their entireties.

[0741] Exemplary nucleotide and polypeptide sequences for the gene editing system disclosed herein are provided below in Table 9. Methods for identifying alternate nucleotide sequences encoding polypeptide sequences provided herein, including alternate naturally occurring variants, are known in the art. Sequences with at least 75%, 80%, 85%, 90%, 95%, 96%, 97%, 98%, or 99% identity to any of the nucleic acid sequences, or nucleic acid sequences encoding the amino acid sequences provided herein are also contemplated.

### G. CRISPR Guide RNA

[0742] Provided herein are guide sequences useful for modifying a target sequence, e.g., using a guide RNA comprising a disclosed guide sequence with an RNA-guided DNA binding agent (e.g., a CRISPR/Cas system). Guide sequences are shown in Tables 2, 3, 3A, 4, 5A, 5B, 6, 7, and 9A (e.g., SEQ ID NOs: 1-91, 101-185, 301-498, and 500-590), as are the genomic coordinates that these guide RNAs target.

[0743] In some embodiments, a gRNA provided herein comprises a guide region (guide sequence) and a conserved region comprising a repeat/anti-repeat region, a hairpin 1 region, and a hairpin 2 region, wherein one or more of the repeat/anti-repeat region, the hairpin 1 region, and the hairpin 2 region are shortened. In some embodiments, the gRNA is from S. pyogenes Cas9 (SpyCas9). In some embodiments, the gRNA is from N. meningitidis Cas9 (NmeCas9).

[0744] An exemplary conserved region of an SpyCas9 guide RNA is shown in Table 8A (SEQ ID NO: 600). An exemplary conserved region of an NmeCas9 guide RNA is shown in Table 8B (SEQ ID NO: 3126). The first row shows the numbering of the nucleotides; the second row shows an exemplary sequence; and the third (and fourth) rows show the regions. “Shortened” with respect to an sgRNA means that its conserved region lacks at least one nucleotide shown in Table 8A-8B, as discussed in detail below.

[0745] Each of SpyCas9 guide RNAs disclosed herein may further comprise additional nucleotides to form a crRNA, e.g., with the following exemplary nucleotide sequence following the guide sequence at its 3′ end: GUUUUAGAGCUAUGCUGUUUUG (SEQ ID NO: 601) in 5′ to 3′ orientation. In the case of a sgRNA, the above guide sequences may further comprise additional nucleotides (scaffold sequence) to form a sgRNA, e.g., with the following exemplary nucleotide sequence following the 3′ end of the guide sequence: GUUUUAGAGCUAGAAAUAGCAAGUUAAAAUAAGGCUAGUCCGUUAUCAACUU GAAAAAGUGGCACCGAGUCGGUGCUUUU (SEQ ID NO: 602) or GUUUUAGAGCUAGAAAUAGCAAGUUAAAAUAAGGCUAGUCCGUUAUCAACUU GAAAAAGUGGCACCGAGUCGGUGC (SEQ ID NO: 603, which is SEQ ID NO: 602 without the four terminal U's) in 5′ to 3′ orientation. In some embodiments, the four terminal U's of SEQ ID NO: 602 are not present. In some embodiments, only 1, 2, or 3 of the four terminal U's of SEQ ID NO: 602 are present.

[0746] In some embodiments, the SpyCas9 sgRNA comprises any one of the SpyCas9 guide sequences (e.g., HLA-B guide sequences of SEQ ID NOs: 1-91 or any one of the HLA-A guide sequences of SEQ ID NOs: 301-428 and 463-511) and additional nucleotides to form a crRNA, e.g., with the following exemplary scaffold nucleotide sequence following the guide sequence at its 3′ end: GUUUUAGAGCUAGAAAUAGCAAGUUAAAAUAAGGCUAGUCCGUUAUCAACUU GGCACCGAGUCGGUGC (SEQ ID NO: 604) in 5′ to 3′ orientation. SEQ ID NO: 604 lacks 8 nucleotides with reference to a wild-type guide RNA conserved sequence: GUUUUAGAGCUAGAAAUAGCAAGUUAAAAUAAGGCUAGUCCGUUAUCAACUU GAAAAAGUGGCACCGAGUCGGUGC (SEQ ID NO: 600). Other exemplary scaffold nucleotide sequences are provided in Table 9. In some embodiments, the sgRNA comprises any one of the guide sequences of SEQ ID NOs: 1-91, 301-428, or 463-511 and additional guide scaffold sequences, in 5′ to 3′ orientation, in Table 9, including modified versions of the scaffold sequences, as shown.

[0747] In some embodiments, a gRNA provided herein comprises a guide region and a conserved region comprising a repeat/anti-repeat region, a hairpin 1 region, and a hairpin 2 region, wherein one or more of the repeat/anti-repeat region, the hairpin 1 region, and the hairpin 2 region are shortened. In some embodiments, the gRNA is from N. meningitidis Cas9 (NmeCas9).

[0748] In some embodiments, the guide RNA comprises a modified sgRNA. In some embodiments, the sgRNA comprises any one of the modification patterns of the modified sgRNA sequences provided in Tables 2, 3, 3A, 4, 5A, 5B, 6, 7, 8A, 8B, 9, and 9A. In some embodiments, the conserved region comprises any one of modified conserved region Nine guide RNA motifs in Tables 8B, 9, and 9A, and wherein the conserved region is 3′ of the guide region (guide sequence). In some embodiments, the conserved region comprises a modified sequence comprising any one of SEQ ID NOs: 715-723, and wherein the conserved region is 3′ of the guide region (guide sequence). In some embodiments, the guide RNA comprises a nucleotide sequence selected from any one of SEQ ID NOs: 708 and 712-714, where the N's represent collectively any guide sequence disclosed herein, including the guide sequences provided in Tables 3, 3A, 5A, 7, and 9A. In certain embodiments, the N's represent collectively a guide sequence that is at least 80%, 85%, 90%, 95%, or 100% identical to or complementary to any one of the guide sequences provided in Tables 3, 3A, 5A, 7, and 9A. In certain embodiments, the N's represent collectively any one of the guide sequences provided in Tables 3, 3A, 5A, 7, and 9A. In certain embodiments, when the N's represent collectively a guide sequence, within (N)₂₀₋₂₅, each N of the (N)₂₀₋₂₅ may be independently modified, e.g., modified with a 2′-OMe modification, optionally further with a PS modification, particularly at 1, 2, or 3 terminal nucleotides. In certain embodiments, the (N)₂₀₋₂₅ has the following sequence and modification pattern:

mN*mN*mN*mNmNNNmNmNNmNNmNNNNNmNNNNmNNN.

[0749] An exemplary conserved region of an NmeCas9 single guide RNA (Nine sgRNA) is shown in Table 8B (SEQ ID NO: 3126). The first row shows the numbering of the nucleotides; the second row shows an exemplary sequence; and the third (and fourth) rows show the regions. “Shortened” with respect to an sgRNA means that its conserved region lacks at least one nucleotide shown in Table 8B, as discussed in detail below.

[0750] In some embodiments, the NmeCas9 sgRNA comprises any one of the Nine Cas9 guide sequences disclosed herein (e.g., SEQ ID NOs: 101-185) and additional nucleotides to form a crRNA, e.g., with the following exemplary scaffold nucleotide sequence following the guide sequence at its 3′ end:

(SEQ ID NO: 699)
GUUGUAGCUCCCUUUCUCAUUUCGGAAACGAAAUGAGAACCGUUGCUAC
AAUAAGGCCGUCUGAAAAGAUGUGCCGCAACGCUCUGCCCCUUAAAGCU
UCUGCUUUAAGGGGCAUCGUUUA.

[0751] In some embodiments, the NmeCas9sgRNA comprises any one of the guide sequences of SEQ ID NOs: 101-185 and additional nucleotides to form a crRNA with the following nucleotide sequence following the guide sequence at its 3′ end:

(SEQ ID NO: 701)
GUUGUAGCUCCCUGAAACCGUUGCUACAAUAAGGCCGUCGAAAGAUGU
GCCGCAACGCUCUGCCUUCUGGCAUCGUU;
(SEQ ID NO: 702)
GUUGUAGCUCCCUGAAACCGUUGCUACAAUAAGGCCGUCGAAAGAUGU
GCCGCAACGCUCUGCCUUCUGGCAUCGUUUAUU;
(SEQ ID NO: 703)
GUUGUAGCUCCCUGGAAACCCGUUGCUACAAUAAGGCCGUCGAAAGA
UGUGCCGCAACGCUCUGCCUUCUGGCAUCGUUUAUU.

[0752] In some embodiments, the guide RNA is a chemically modified guide RNA. In some embodiments, the guide RNA is a chemically modified single guide RNA. The chemically modified guide RNAs may comprise one or more of the modifications as shown in Tables 2-7. The chemically modified guide RNAs may comprise one or more of modified nucleotides of any one of SEQ ID NOs: 705-714.

[0753] In some embodiments, the guide RNA is a sgRNA comprising the modification pattern shown in SEQ ID NO: 705-714.

[0754] In some embodiments, the guide RNA comprises a sgRNA comprising the modification pattern shown in SEQ ID NO: 705, 708, 711, 712, 713, or 714. In some embodiments, the guide RNA comprises a sgRNA comprising the modified nucleotides of SEQ ID NO: 705, 708, 711, 712, 713, or 714, including a guide sequence disclosed herein (e.g., SEQ ID NOs: 1-91). In some embodiments, the guide RNA is a sgRNA comprising a sequence of SEQ ID NO: 705, 708, 711, 712, 713, or 714 or a sequence that is at least 99%, 98%, 97%, 96%, 95%, 94%, 93%, 92%, 91%, or 90% identical to SEQ ID NO: 705, 708, 711, 712, 713, or 714.

[0755] The guide RNA may further comprise a trRNA. In each composition and method embodiment described herein, the crRNA and trRNA may be associated as a single RNA (sgRNA) or may be on separate RNAs (dgRNA). In the context of sgRNAs, the crRNA and trRNA components may be covalently linked, e.g., via a phosphodiester bond or other covalent bond. In some embodiments, a crRNA or trRNA sequence may be referred to as a “scaffold” or “conserved portion” of a guide RNA.

[0756] In each of the compositions, use, and method embodiments described herein, the guide RNA may comprise two RNA molecules as a “dual guide RNA” or “dgRNA.” The dgRNA comprises a first RNA molecule comprising a crRNA comprising, e.g., a guide sequence shown in Tables 2-3, and a second RNA molecule comprising a trRNA. The first and second RNA molecules may not be covalently linked, but may form an RNA duplex via the base pairing between portions of the crRNA and the trRNA.

[0757] In each of the composition, use, and method embodiments described herein, the guide RNA may comprise a single RNA molecule as a “single guide RNA” or “sgRNA”. The sgRNA may comprise a crRNA (or a portion thereof) comprising a guide sequence shown in Tables 2-3, covalently linked to a trRNA. The sgRNA may comprise 17, 18, 19, or 20 contiguous nucleotides of a guide sequence shown in Tables 2-3. In some embodiments, the crRNA and the trRNA are covalently linked via a linker. In some embodiments, the sgRNA forms a stem-loop structure via the base pairing between portions of the crRNA and the trRNA. In some embodiments, the crRNA and the trRNA are covalently linked via one or more bonds that are not a phosphodiester bond.

[0758] In some embodiments, the trRNA may comprise all or a portion of a trRNA sequence derived from a naturally-occurring CRISPR/Cas system. In some embodiments, the trRNA comprises a truncated or modified wild type trRNA. The length of the trRNA depends on the CRISPR/Cas system used. In some embodiments, the trRNA comprises or consists of 5, 6, 7, 8, 9, 10, 11, 12, 13, 14, 15, 16, 17, 18, 19, 20, 25, 30, 40, 50, 60, 70, 80, 90, 100, or more than 100 nucleotides. In some embodiments, the trRNA may comprise certain secondary structures, such as, for example, one or more hairpin or stem-loop structures, or one or more bulge structures.

[0759] In some embodiments, a composition comprising one or more guide RNAs comprising a guide sequence of any one in Tables 2-3 (for HLA-B SpyCas9 and NmeCas9 guides) and Tables 4, 5B and 6 (for HLA-A SpyCas9 guides) and Table 5A and 7 (for HLA-A NmeCas9 guides) is provided. In some embodiments, a composition comprising one or more guide RNAs comprising a guide sequence of any one in Tables 2-3 is provided, wherein the nucleotides of SEQ ID NO: 601-604 follow the guide sequence at its 3′ end. In some embodiments, the one or more guide RNAs comprising a guide sequence of any one in Tables 2-3 (for HLA-B SpyCas9 and NmeCas9 guides) and Tables 4, 5B and 6 (for HLA-A SpyCas9 guides), wherein the nucleotides of SEQ ID NO: 601-604 follow the guide sequence at its 3′ end, is modified according to the modification pattern of any one of SEQ ID NOs: 3003, 3007-3009, and 3011-3014.

[0760] In some embodiments, a composition comprising one or more guide RNAs comprising a guide sequence of any one in Tables 2-3 (for HLA-B SpyCas9 and NmeCas9 guides) and Tables 4, 5B and 6 (for HLA-A SpyCas9 guides) is provided. In one aspect, a composition comprising one or more gRNAs is provided, comprising a guide sequence that is at least 99%, 98%, 97%, 96%, 95%, 94%, 93%, 92%, 91%, or 90% identical to any of the nucleic acids of SEQ ID NOs: 1-91, 301-428, and 463-511.

[0761] In other embodiments, a composition is provided that comprises at least one, e.g., at least two gRNA's comprising guide sequences selected from any two or more of the guide sequences shown in Tables 2-3 (for HLA-B SpyCas9 and NmeCas9 guides) and Tables 4, 5B and 6 (for HLA-A SpyCas9 guides). In some embodiments, the composition comprises at least two gRNA's that each comprise a guide sequence at least 99%, 98%, 97%, 96%, 95%, 94%, 93%, 92%, 91%, or 90% identical to any of the guide sequences shown in Tables 2-3 (for HLA-B SpyCas9 and NmeCas9 guides) and Tables 4, 5B, and 6 (for HLA-A SpyCas9 and NmeCas9 guides).

[0762] In some embodiments, the guide RNA compositions of the present invention are designed to recognize (e.g., hybridize to) a target sequence in HLA-B. For example, the HLA-B target sequence may be recognized and cleaved by a provided Cas cleavase comprising a guide RNA. In some embodiments, an RNA-guided DNA binding agent, such as a Cas cleavase, may be directed by a guide RNA to a target sequence in HLA-B, where the guide sequence of the guide RNA hybridizes with the target sequence and the RNA-guided DNA binding agent, such as a Cas cleavase, cleaves the target sequence.

[0763] In some embodiments, the guide RNA compositions of the present invention are designed to recognize (or hybridize to) a target sequence in HLA-A and HLA-B. For example, the HLA-A and HLA-B target sequence may be recognized and cleaved by a provided Cas cleavase comprising a guide RNA. In some embodiments, an RNA-guided DNA binding agent, such as a Cas cleavase, may be directed by a guide RNA to a target sequence in HLA-A and HLA-B, where the guide sequence of the guide RNA hybridizes with the target sequence and the RNA-guided DNA binding agent, such as a Cas cleavase, cleaves the target sequence.

[0764] In some embodiments, the selection of the one or more HLA-B guide RNAs is determined based on target sequences within HLA-B. In some embodiments, the compositions comprising one or more guide sequences comprise a guide sequence that is complementary to the corresponding genomic region shown in Tables 2-3, according to coordinates from human reference genome hg38. Guide sequences of further embodiments may be complementary to sequences in the close vicinity of the genomic coordinate listed in any of the Tables 2-3 within HLA-B. For example, guide sequences of further embodiments may be complementary to sequences that comprise 10 contiguous nucleotides ±10 nucleotides of a genomic coordinate listed in Tables 2-3.

[0765] In some embodiments, the selection of the one or more HLA-A guide RNAs is determined based on target sequences within HLA-A. In some embodiments, the compositions comprising one or more guide sequences comprise a guide sequence that is complementary to the corresponding genomic region shown in Tables 4-7, according to coordinates from human reference genome hg38. Guide sequences of further embodiments may be complementary to sequences in the close vicinity of the genomic coordinate listed in any of the Tables 4-7 within HLA-A. For example, guide sequences of further embodiments may be complementary to sequences that comprise 10 contiguous nucleotides ±10 nucleotides of a genomic coordinate listed in Tables 4-7. Without being bound by any particular theory, modifications (e.g., frameshift mutations resulting from indels occurring as a result of a nuclease-mediated DSB) in certain regions of the target gene may be less tolerable than mutations in other regions, thus the location of a DSB is an important factor in the amount or type of protein knockdown that may result. In some embodiments, a gRNA complementary or having complementarity to a target sequence within the target gene used to direct an RNA-guided DNA binding agent to a particular location in the target gene.

[0766] In some embodiments, the guide sequence is at least 99%, 98%, 97%, 96%, 95%, 94%, 93%, 92%, 91%, 90%, 85%, or 80% identical to a target sequence present in the target gene. In some embodiments, the guide sequence is at least 99%, 98%, 97%, 96%, 95%, 94%, 93%, 92%, 91%, 90%, 85%, or 80% identical to a target sequence present in the human HLA-A or HLA-B gene.

[0767] In some embodiments, the target sequence may be complementary to the guide sequence of the guide RNA. In some embodiments, the degree of complementarity or identity between a guide sequence of a guide RNA and its corresponding target sequence may be at least 80%, 85%, 90%, 95%, 96%, 97%, 98%, 99%, or 100%. In some embodiments, the target sequence and the guide sequence of the gRNA may be 100% complementary or identical. In other embodiments, the target sequence and the guide sequence of the gRNA may contain at least one mismatch. For example, the target sequence and the guide sequence of the gRNA may contain 1, 2, 3, or 4 mismatches, where the total length of the guide sequence is 20. In some embodiments, the target sequence and the guide sequence of the gRNA may contain 1-4 mismatches where the guide sequence is 20 nucleotides.

[0768] In some embodiments, a composition or formulation disclosed herein comprises an mRNA comprising an open reading frame (ORF) encoding an RNA-guided DNA binding agent, such as a Cas nuclease as described herein. In some embodiments, an mRNA comprising an ORF encoding an RNA-guided DNA binding agent, such as a Cas nuclease, is provided, used, or administered.

### H. Modified gRNAs and mRNAs

[0769] In some embodiments, the gRNA (e.g., sgRNA, short-sgRNA, dgRNA, or crRNA) is modified. The term “modified” or “modification” in the context of a gRNA described herein includes, the modifications described above, including, for example, (a) end modifications, e.g., 5′ end modifications or 3′ end modifications, including 5′ or 3′ protective end modifications, (b) nucleobase (or “base”) modifications, including replacement or removal of bases, (c) sugar modifications, including modifications at the 2′, 3′, or 4′ positions, (d) internucleoside linkage modifications, and (e) backbone modifications, which can include modification or replacement of the phosphodiester linkages or the ribose sugar. A modification of a nucleotide at a given position includes a modification or replacement of the phosphodiester linkage immediately 3′ of the sugar of the nucleotide. Thus, for example, a nucleic acid comprising a phosphorothioate between the first and second sugars from the 5′ end is considered to comprise a modification at position 1. The term “modified gRNA” generally refers to a gRNA having a modification to the chemical structure of one or more of the base, the sugar, and the phosphodiester linkage or backbone portions, including nucleotide phosphates, all as detailed and exemplified herein.

[0770] Further description and exemplary patterns of modifications are provided in Table 1 of WO2019/237069 published Dec. 12, 2019, the entire contents of which are incorporated herein by reference.

[0771] In some embodiments, a gRNA comprises modifications at 1, 2, 3, 4, 5, 6, 7, 8, 9, 10, 11, 12, 13, 14, 15, 16, or more YA sites. In some embodiments, the pyrimidine of the YA site comprises a modification (which includes a modification altering the internucleoside linkage immediately 3′ of the sugar of the pyrimidine). In some embodiments, the adenine of the YA site comprises a modification (which includes a modification altering the internucleoside linkage immediately 3′ of the sugar of the adenine). In some embodiments, the pyrimidine and the adenine of the YA site comprise modifications, such as sugar, base, or internucleoside linkage modifications. The YA modifications can be any of the types of modifications set forth herein. In some embodiments, the YA modifications comprise one or more of phosphorothioate, 2′-OMe, or 2′-fluoro. In some embodiments, the YA modifications comprise pyrimidine modifications comprising one or more of phosphorothioate, 2′-OMe, 2′-H, inosine, or 2′-fluoro. In some embodiments, the YA modification comprises a bicyclic ribose analog (e.g., an LNA, BNA, or ENA) within an RNA duplex region that contains one or more YA sites. In some embodiments, the YA modification comprises a bicyclic ribose analog (e.g., an LNA, BNA, or ENA) within an RNA duplex region that contains a YA site, wherein the YA modification is distal to the YA site.

[0772] In some embodiments, the guide sequence (or guide region) of a gRNA comprises 1, 2, 3, 4, 5, or more YA sites (“guide region YA sites”) that may comprise YA modifications. In some embodiments, one or more YA sites located at 5-end, 6-end, 7-end, 8-end, 9-end, or 10-end from the 5′ end of the 5′ terminus (where “5-end”, etc., refers to position 5 to the 3′ end of the guide region, i.e., the most 3′ nucleotide in the guide region) comprise YA modifications. A modified guide region YA site comprises a YA modification.

[0773] In some embodiments, a modified guide region YA site is within 20, 19, 18, 17, 16, 15, 14, 13, 12, 11, 10, or 9 nucleotides of the 3′ terminal nucleotide of the guide region. For example, if a modified guide region YA site is within 10 nucleotides of the 3′ terminal nucleotide of the guide region and the guide region is 20 nucleotides long, then the modified nucleotide of the modified guide region YA site is located at any of positions 11-20. In some embodiments, a modified guide region YA site is at or after nucleotide 4, 5, 6, 7, 8, 9, 10, or 11 from the 5′ end of the 5′ terminus.

[0774] In some embodiments, a modified guide region YA site is other than a 5′ end modification. For example, a sgRNA can comprise a 5′ end modification as described herein and further comprise a modified guide region YA site. Alternatively, a sgRNA can comprise an unmodified 5′ end and a modified guide region YA site. Alternatively, a short-sgRNA can comprise a modified 5′ end and an unmodified guide region YA site.

[0775] In some embodiments, a modified guide region YA site comprises a modification that at least one nucleotide located 5′ of the guide region YA site does not comprise. For example, if nucleotides 1-3 comprise phosphorothioates, nucleotide 4 comprises only a 2′-OMe modification, and nucleotide 5 is the pyrimidine of a YA site and comprises a phosphorothioate, then the modified guide region YA site comprises a modification (phosphorothioate) that at least one nucleotide located 5′ of the guide region YA site (nucleotide 4) does not comprise. In another example, if nucleotides 1-3 comprise phosphorothioates, and nucleotide 4 is the pyrimidine of a YA site and comprises a 2′-OMe, then the modified guide region YA site comprises a modification (2′-OMe) that at least one nucleotide located 5′ of the guide region YA site (any of nucleotides 1-3) does not comprise. This condition is also always satisfied if an unmodified nucleotide is located 5′ of the modified guide region YA site.

[0776] In some embodiments, the modified guide region YA sites comprise modifications as described for YA sites above. The guide region of a gRNA may be modified according to any embodiment comprising a modified guide region set forth herein. Any embodiments set forth elsewhere in this disclosure may be combined to the extent feasible with any of the foregoing embodiments.

[0777] In some embodiments, the 5′ or 3′ terminus regions of a gRNA are modified.

[0778] In some embodiments, the terminal (i.e., last) 1, 2, 3, 4, 5, 6, or 7 nucleotides in the 3′ terminus region are modified. Throughout, this modification may be referred to as a “3′ end modification”. In some embodiments, the terminal (i.e., last) 1, 2, 3, 4, 5, 6, or 7 nucleotides in the 3′ terminus region comprise more than one modification. In some embodiments, the 3′ end modification comprises or further comprises any one or more of the following: a modified nucleotide selected from 2′-O-methyl (2′-O-Me) modified nucleotide, 2′-O-(2-methoxyethyl) (2′-O-moe) modified nucleotide, a 2′-fluoro (2′-F) modified nucleotide, a phosphorothioate (PS) linkage between nucleotides, an inverted abasic modified nucleotide, or combinations thereof. In some embodiments, the 3′ end modification comprises or further comprises modifications of 1, 2, 3, 4, 5, 6, or 7 nucleotides at the 3′ end of the gRNA. In some embodiments, the 3′ end modification comprises or further comprises one PS linkage, wherein the linkage is between the last and second to last nucleotide. In some embodiments, the 3′ end modification comprises or further comprises two PS linkages between the last three nucleotides. In some embodiments, the 3′ end modification comprises or further comprises four PS linkages between the last four nucleotides. In some embodiments, the 3′ end modification comprises or further comprises PS linkages between any one or more of the last 2, 3, 4, 5, 6, or 7 nucleotides. In some embodiments, the gRNA comprising a 3′ end modification comprises or further comprises a 3′ tail, wherein the 3′ tail comprises a modification of any one or more of the nucleotides present in the 3′ tail. In some embodiments, the 3′ tail is fully modified. In some embodiments, the 3′ tail comprises 1, 2, 3, 4, 5, 6, 7, 8, 9, 10, 1-2, 1-3, 1-4, 1-5, 1-6, 1-7, 1-8, 1-9, or 1-10 nucleotides, optionally where any one or more of these nucleotides are modified. In some embodiments, a gRNA is provided comprising a 3′ protective end modification. In some embodiments, the 3′ tail comprises between 1 and about 20 nucleotides, between 1 and about 15 nucleotides, between 1 and about 10 nucleotides, between 1 and about 5 nucleotides, between 1 and about 4 nucleotides, between 1 and about 3 nucleotides, and between 1 and about 2 nucleotides. In some embodiments, the gRNA does not comprise a 3′ tail.

[0779] In some embodiments, the 5′ terminus region is modified, for example, the first 1, 2, 3, 4, 5, 6, or 7 nucleotides of the gRNA are modified. Throughout, this modification may be referred to as a “5′ end modification”. In some embodiments, the first 1, 2, 3, 4, 5, 6, or 7 nucleotides of the 5′ terminus region comprise more than one modification. In some embodiments, at least one of the terminal (i.e., first) 1, 2, 3, 4, 5, 6, or 7 nucleotides at the 5′ end are modified. In some embodiments, both the 5′ and 3′ terminus regions (e.g., ends) of the gRNA are modified. In some embodiments, only the 5′ terminus region of the gRNA is modified. In some embodiments, only the 3′ terminus region (plus or minus a 3′ tail) of the conserved portion of a gRNA is modified. In some embodiments, the gRNA comprises modifications at 1, 2, 3, 4, 5, 6, or 7 of the first 7 nucleotides at a 5′ terminus region of the gRNA. In some embodiments, the gRNA comprises modifications at 1, 2, 3, 4, 5, 6, or 7 of the 7 terminal nucleotides at a 3′ terminus region. In some embodiments, 2, 3, or 4 of the first 4 nucleotides at the 5′ terminus region, or 2, 3, or 4 of the terminal 4 nucleotides at the 3′ terminus region are modified. In some embodiments, 2, 3, or 4 of the first 4 nucleotides at the 5′ terminus region are linked with phosphorothioate (PS) bonds. In some embodiments, the modification to the 5′ terminus or 3′ terminus comprises a 2′-O-methyl (2′-O-Me) or 2′-O-(2-methoxyethyl) (2′-O-moe) modification. In some embodiments, the modification comprises a 2′-fluoro (2′-F) modification to a nucleotide. In some embodiments, the modification comprises a phosphorothioate (PS) linkage between nucleotides. In some embodiments, the modification comprises an inverted abasic nucleotide. In some embodiments, the modification comprises a protective end modification. In some embodiments, the modification comprises a more than one modification selected from protective end modification, 2′-O-Me, 2′-O-moe, 2′-fluoro (2′-F), a phosphorothioate (PS) linkage between nucleotides, and an inverted abasic nucleotide. In some embodiments, an equivalent modification is encompassed.

[0780] In some embodiments, a gRNA is provided comprising a 5′ end modification and a 3′ end modification. In some embodiments, the gRNA comprises modified nucleotides that are not at the 5′ or 3′ ends.

[0781] In some embodiments, a sgRNA is provided comprising an upper stem modification, wherein the upper stem modification comprises a modification to any one or more of US1-US12 in the upper stem region. In some embodiments, a sgRNA is provided comprising an upper stem modification, wherein the upper stem modification comprises a modification of at least 1, 2, 3, 4, 5, 6, 7, 8, 9, 10, 11, or all 12 nucleotides in the upper stem region. In some embodiments, an sgRNA is provided comprising an upper stem modification, wherein the upper stem modification comprises 1, 2, 3, 4, or 5 YA modifications in a YA site. In some embodiments, the upper stem modification comprises a 2′-OMe modified nucleotide, a 2′-O-moe modified nucleotide, a 2′-F modified nucleotide, or combinations thereof. Other modifications described herein, such as a 5′ end modification or a 3′ end modification may be combined with an upper stem modification.

[0782] In some embodiments, the sgRNA comprises a modification in the hairpin region. In some embodiments, the hairpin region modification comprises at least one modified nucleotide selected from a 2′-O-methyl (2′-OMe) modified nucleotide, a 2′-fluoro (2′-F) modified nucleotide, or combinations thereof. In some embodiments, the hairpin region modification is in the hairpin 1 region. In some embodiments, the hairpin region modification is in the hairpin 2 region. In some embodiments, the hairpin modification comprises 1, 2, or 3 YA modifications in a YA site. In some embodiments, the hairpin modification comprises at least 1, 2, 3, 4, 5, or 6 YA modifications. Other modifications described herein, such as an upper stem modification, a 5′ end modification, or a 3′ end modification may be combined with a modification in the hairpin region.

[0783] In some embodiments, a gRNA comprises a substituted and optionally shortened hairpin 1 region, wherein at least one of the following pairs of nucleotides are substituted in the substituted and optionally shortened hairpin 1 with Watson-Crick pairing nucleotides: H1-1 and H1-12, H1-2 and H1-11, H1-3 and H1-10, or H1-4 and H1-9. “Watson-Crick pairing nucleotides” include any pair capable of forming a Watson-Crick base pair, including A-T, A-U, T-A, U-A, C-G, and G-C pairs, and pairs including modified versions of any of the foregoing nucleotides that have the same base pairing preference. In some embodiments, the hairpin 1 region lacks any one or two of H1-5 through H1-8. In some embodiments, the hairpin 1 region lacks one, two, or three of the following pairs of nucleotides: H1-1 and H1-12, H1-2 and H1-11, H1-3 and H1-10 or H1-4 and H1-9. In some embodiments, the hairpin 1 region lacks 1-8 nucleotides of the hairpin 1 region. In any of the foregoing embodiments, the lacking nucleotides may be such that the one or more nucleotide pairs substituted with Watson-Crick pairing nucleotides (H1-1 and H1-12, H1-2 and H1-11, H1-3 and H1-10, or H1-4 and H1-9) form a base pair in the gRNA.

[0784] In some embodiments, the gRNA further comprises an upper stem region lacking at least 1 nucleotide, e.g., any of the shortened upper stem regions indicated in Table 7 of WO/2021/119275, the contents of which are hereby incorporated by reference in its entirety, or described elsewhere herein, which may be combined with any of the shortened or substituted hairpin 1 regions described herein.

[0785] In some embodiments, an sgRNA provided herein is a short-single guide RNAs (short-sgRNAs), e.g., comprising a conserved portion of an sgRNA comprising a hairpin region, wherein the hairpin region lacks at least 5-10 nucleotides or 6-10 nucleotides. In some embodiments, the 5-10 nucleotides or 6-10 nucleotides are consecutive.

[0786] In some embodiments, a short-sgRNA lacks at least nucleotides 54-58 (AAAAA) of the conserved portion of a spyCas9 sgRNA. In some embodiments, a short-sgRNA is a non-spyCas9 sgRNA that lacks nucleotides corresponding to nucleotides 54-58 (AAAAA) of the conserved portion of a spyCas9 as determined, for example, by pairwise or structural alignment.

[0787] In some embodiments, the short-sgRNA described herein comprises a conserved portion comprising a hairpin region, wherein the hairpin region lacks 5, 6, 7, 8, 9, 10, 11, or 12 nucleotides. In some embodiments, the lacking nucleotides are 5-10 lacking nucleotides or 6-10 lacking nucleotides. In some embodiments, the lacking nucleotides are consecutive. In some embodiments, the lacking nucleotides span at least a portion of hairpin 1 and a portion of hairpin 2. In some embodiments, the 5-10 lacking nucleotides comprise or consist of nucleotides 54-58, 54-61, or 53-60 of SEQ ID NO: 600.

[0788] In some embodiments, the short-sgRNA described herein further comprises a nexus region, wherein the nexus region lacks at least one nucleotide (e.g., 1, 2, 3, 4, 5, 6, 7, 8, 9, or 10 nucleotides in the nexus region). In some embodiments, the short-sgRNA lacks each nucleotide in the nexus region.

[0789] In some embodiments, the SpyCas9 short-sgRNA described herein comprises a sequence of

(SEQ ID NO: 3002)
NNNNNNNNNNNNNNNNNNNNGUUUUAGAGCUAGAAAUAGCAAGUUAAAA
UAAGGCUAGUCCGUUAUCACGAAAGGGCACCGAGUCGGUGCU.

[0790] In some embodiments, the short-sgRNA described herein comprises a modification pattern as shown in SEQ ID NO: 3003: mN*mN*mN*NNNNNNNNNNNNNNNNNGUUUUAGAmGmCmUmAmGmAmAmAmU mAmGmCAAGUUAAAAUAAGGCUAGUCCGUUAUCACGAAAGGGCACCGAGUCG GmUmGmC*mU (SEQ ID NO: 3003), where A, C, G, U, and N are adenine, cytosine, guanine, uracil, and any ribonucleotide, respectively, unless otherwise indicated. An m is indicative of a 2′O-methyl modification, and an * is indicative of a phosphorothioate linkage between the nucleotides.

[0791] In certain embodiments, using SEQ ID NO: 600 (“Exemplary SpyCas9 sgRNA-1”) as an example, the Exemplary SpyCas9 sgRNA-1 further includes one or more of:
[0792] A. a shortened hairpin 1 region, or a substituted and optionally shortened hairpin 1 region, wherein
   [0793] 1. at least one of the following pairs of nucleotides are substituted in hairpin 1 with Watson-Crick pairing nucleotides: H1-1 and H1-12, H1-2 and H1-11, H1-3 and H1-10, or H1-4 and H1-9, and the hairpin 1 region optionally lacks
      [0794] a. any one or two of H1-5 through H1-8,
      [0795] b. one, two, or three of the following pairs of nucleotides: H1-1 and H1-12, H1-2 and H1-11, H1-3 and H1-10, and H1-4 and H1-9, or
      [0796] c. 1-8 nucleotides of hairpin 1 region; or
   [0797] 2. the shortened hairpin 1 region lacks 6-8 nucleotides, preferably 6 nucleotides; and
      [0798] a. one or more of positions H1-1, H1-2, or H1-3 is deleted or substituted relative to Exemplary SpyCas9 sgRNA-1 (SEQ ID NO: 600) or
      [0799] b. one or more of positions H1-6 through H1-10 is substituted relative to Exemplary SpyCas9 sgRNA-1 (SEQ ID NO: 600); or
   [0800] 3. the shortened hairpin 1 region lacks 5-10 nucleotides, preferably 5-6 nucleotides, and one or more of positions N18, H1-12, or n is substituted relative to Exemplary SpyCas9 sgRNA-1 (SEQ ID NO: 600); or
[0801] B. a shortened upper stem region, wherein the shortened upper stem region lacks 1-6 nucleotides and wherein the 6, 7, 8, 9, 10, or 11 nucleotides of the shortened upper stem region include less than or equal to 4 substitutions relative to Exemplary SpyCas9 sgRNA-1 (SEQ ID NO: 600); or
[0802] C. a substitution relative to Exemplary SpyCas9 sgRNA-1 (SEQ ID NO: 600) at any one or more of LS6, LS7, US3, US10, B3, N7, N15, N17, H2-2 and H2-14, wherein the substituent nucleotide is neither a pyrimidine that is followed by an adenine, nor an adenine that is preceded by a pyrimidine; or
[0803] D. Exemplary SpyCas9 sgRNA-1 (SEQ ID NO: 600) with an upper stem region, wherein the upper stem modification comprises a modification to any one or more of US1-US12 in the upper stem region, wherein
   [0804] 1. the modified nucleotide is optionally selected from a 2′-O-methyl (2′-OMe) modified nucleotide, a 2′-O-(2-methoxyethyl) (2′-O-moe) modified nucleotide, a 2′-fluoro (2′-F) modified nucleotide, a phosphorothioate (PS) linkage between nucleotides, an inverted abasic modified nucleotide, or a combination thereof; or
   [0805] 2. the modified nucleotide optionally includes a 2′-OMe modified nucleotide.

[0806] In certain embodiments, Exemplary SpyCas9 sgRNA-1, or an sgRNA, such as an sgRNA comprising Exemplary SpyCas9 sgRNA-1, further includes a 3′ tail, e.g., a 3′ tail of 1, 2, 3, 4, or more nucleotides. In certain embodiments, the tail includes one or more modified nucleotides. In certain embodiments, the modified nucleotide is selected from a 2′-O-methyl (2′-OMe) modified nucleotide, a 2′-O-(2-methoxyethyl) (2′-O-moe) modified nucleotide, a 2′-fluoro (2′-F) modified nucleotide, a phosphorothioate (PS) linkage between nucleotides, and an inverted abasic modified nucleotide, or a combination thereof. In certain embodiments, the modified nucleotide includes a 2′-OMe modified nucleotide. In certain embodiments, the modified nucleotide includes a PS linkage between nucleotides. In certain embodiments, the modified nucleotide includes a 2′-OMe modified nucleotide and a PS linkage between nucleotides.

[0807] In some embodiments, the NmeCas9 gRNA described herein further comprises a nexus region, wherein the nexus region lacks at least one nucleotide.

[0808] In some embodiments, the HLA-B NmeCas9 sgRNA chosen from SEQ ID NOs 101-185 comprises a conserved portion comprising a repeat/anti-repeat region, a hairpin 1 region, and a hairpin 2 region, wherein one or more of the repeat/anti-repeat region, the hairpin 1 region, and the hairpin 2 region are shortened.

[0809] In some embodiments, the guide RNA is a Nine sgRNA comprising a conserved portion comprising a repeat/anti-repeat region, a hairpin 1 region, and a hairpin 2 region, wherein one or more of the repeat/anti-repeat region, the hairpin 1 region, and the hairpin 2 region are shortened. In some embodiments, the sgRNA described herein further comprises a guide region and a conserved region, wherein the conserved region comprises one or more of: (a) a shortened repeat/anti-repeat region, wherein the shortened repeat/anti-repeat region lacks 2-24 nucleotides, wherein (i) one or more of nucleotides 37-48 and 53-64 is deleted and optionally one or more of nucleotides 37-64 is substituted relative to SEQ ID NO: 3126; and (ii) nucleotide 36 is linked to nucleotide 65 by at least 2 nucleotides; or (b) a shortened hairpin 1 region, wherein the shortened hairpin 1 lacks 2-10, optionally 2-8 nucleotides, wherein one or more of nucleotides 82-86 and 91-95 is deleted and optionally one or more of positions 82-96 is substituted relative to SEQ ID NO: 3126; and nucleotide 81 is linked to nucleotide 96 by at least 4 nucleotides; or (c) a shortened hairpin 2 region, wherein the shortened hairpin 2 lacks 2-18, optionally 2-16 nucleotides, wherein (i) one or more of nucleotides 113-121 and 126-134 is deleted and optionally one or more of nucleotides 113-134 is substituted relative to SEQ ID NO: 3126; and (ii) nucleotide 112 is linked to nucleotide 135 by at least 4 nucleotides; wherein one or both nucleotides 144-145 are optionally deleted relative to SEQ ID NO: 3126; and wherein at least 10 nucleotides are modified nucleotides.

[0810] In some embodiment, the gRNA disclosed herein is a sgRNA.

[0811] In some embodiments, in the guide sequence, nucleotides 1-4 are modified nucleotides. In some embodiments, in the guide sequence, nucleotides 5, 8, 9, 11, 13, 18, and 22 are modified nucleotides. In some embodiments, in the guide sequence, nucleotides 1-5, 8, 9, 11, 13, 18, and 22 are modified nucleotides. In some embodiments, the modified nucleotides are 2′-O-methyl (2′-O-Me) modified nucleotides. In some embodiments, in the guide sequence, nucleotide 1 is linked to nucleotide 2 by a phosphorothioate (PS) linkage, nucleotide 2 is linked to nucleotide 3 by a PS linkage, and/or nucleotide 3 is linked to nucleotide 4 by a PS linkage.

[0812] In some embodiments, one or both nucleotides 144-145 are deleted relative to SEQ ID NO: 3126.

[0813] In some embodiments, at least 10 nucleotides of the conserved region are modified nucleotides.

[0814] In some embodiments, a repeat/anti-repeat region of a gRNA is a shortened repeat/anti-repeat region lacking 2-24 nucleotides, e.g., any of the repeat/anti-repeat regions indicated in the numbered embodiments above or Tables 3, 3A, 5A, 7, and 9A or described elsewhere herein, which may be combined with any of the shortened hairpin 1 region or hairpin 2 region described herein, including but not limited to combinations indicated in the numbered embodiments above and represented in the sequences of Tables 3, 3A, 5A, 7, and 9A or described elsewhere herein. In some embodiments, one or more of positions 49-52, 87-90, or 122-125 is substituted relative to SEQ ID NO: 3126. In some embodiments, all of positions 49-52, 87-90, or 122-125 are substituted relative to SEQ ID NO: 3126. In some embodiments, the 3′ tail provided in Tables 3, 3A, 5A, 7, and 9A or described herein is deleted.

[0815] In some embodiments, the shortened repeat/anti-repeat region of the gRNA lacks 18 nucleotides. In some embodiments, the shortened repeat/anti-repeat region of the gRNA lacks 22 nucleotides.

[0816] In some embodiments, in the shortened repeat/anti-repeat region of the gRNA, nucleotide 36 is linked to nucleotide 65 by 6 nucleotides. In some embodiments, in the shortened repeat/anti-repeat region of the gRNA, nucleotide 36 is linked to nucleotide 65 by 7 nucleotides. In some embodiments, in the shortened repeat/anti-repeat region of the gRNA, nucleotide 36 is linked to nucleotide 65 by 8 nucleotides. In some embodiments, in the shortened repeat/anti-repeat region of the gRNA, nucleotide 36 is linked to nucleotide 65 by 9 nucleotides. In some embodiments, in the shortened repeat/anti-repeat region of the gRNA, nucleotide 36 is linked to nucleotide 65 by 10 nucleotides.

[0817] In some embodiments, in the shortened repeat/anti-repeat region of the gRNA, nucleotides 38-48 and 53-63 are deleted relative to SEQ ID NO: 3126. In some embodiments, in the shortened repeat/anti-repeat region of the gRNA, nucleotides 38, 41-48, 53-60, and 63 are deleted relative to SEQ ID NO: 3126.

[0818] In some embodiments, in the shortened repeat/anti-repeat region of the gRNA, nucleotide 36 is linked to nucleotide 65 by 6 nucleotides. In some embodiments, in the shortened repeat/anti-repeat region of the gRNA, nucleotides 38-48 and 53-63 are deleted relative to SEQ ID NO: 3126, and nucleotide 36 is linked to nucleotide 65 by nucleotides 37, 49-52, and 64.

[0819] In some embodiments, in the shortened repeat/anti-repeat region of the gRNA, nucleotide 36 is linked to nucleotide 65 by 10 nucleotides. In some embodiments, in the shortened repeat/anti-repeat region of the gRNA, nucleotides 38, 41-48, 53-60, and 63 are deleted relative to SEQ ID NO: 3126, and nucleotide 36 is linked to nucleotide 65 by nucleotides 37, 39, 40, 49-52, 61, 62, and 64.

[0820] In some embodiments, all of nucleotides 38-48 and nucleotides 53-63 of the upper stem of the shortened repeat/anti-repeat region are deleted relative to SEQ ID NO: 3126.

[0821] In some embodiments, all of nucleotides 39-48 and nucleotides 53-62 of the upper stem of the shortened repeat/anti-repeat region are deleted relative to SEQ ID NO: 3126, and nucleotides 38 and 63 is substituted.

[0822] In some embodiments, the shortened repeat/anti-repeat region has 14 modified nucleotides. In some embodiments, the shortened repeat/anti-repeat region has 15 modified nucleotides. In some embodiments, the shortened repeat/anti-repeat region has 16 modified nucleotides. In some embodiments, the shortened repeat/anti-repeat region has 17 modified nucleotides. In some embodiments, the shortened repeat/anti-repeat region has 18 modified nucleotides. In some embodiments, the shortened repeat/anti-repeat region has 19 modified nucleotides. In some embodiments, the shortened repeat/anti-repeat region has 20 modified nucleotides. In some embodiments, in the shortened repeat/anti-repeat region, nucleotides 25, 29, 30, 31, 32, 37, 49-52, 64, 65, 69, 70, and 73 are modified nucleotides. In some embodiments, the modified nucleotides are 2′-O-Me modified nucleotides.

[0823] In some embodiments, between the shortened repeat/anti-repeat region and the shortened hairpin 1 region, nucleotide 76 is linked to nucleotide 77 by a PS linkage.

[0824] In some embodiments, the shortened hairpin 1 region lacks 2 nucleotides. In some embodiments, the shortened hairpin 1 region lacks 21 nucleotides. In some embodiments, the shortened hairpin 1 region lacks 2 nucleotides, and nucleotides 86 and 91 are deleted relative to SEQ ID NO: 3126. In some embodiments, the shortened hairpin 1 region lacks 2 nucleotides, and nucleotides 85 and 92 are deleted relative to SEQ ID NO: 3126. In some embodiments, in the shortened hairpin 1 region, nucleotide 81 is linked to nucleotide 96 by 12 nucleotides. In some embodiments, in the shortened hairpin 1 region, nucleotide 81 is linked to nucleotide 96 by 12 nucleotides. In some embodiments, in the shortened hairpin 1 region, nucleotides 86 and 91 are deleted relative to SEQ ID NO: 3126, and nucleotide 81 is linked to nucleotide 96 by nucleotides 82-85, 87-90, and 92-95. In some embodiments, in the shortened hairpin 1 region, nucleotides 85 and 92 are deleted relative to SEQ ID NO: 3126, and nucleotide 81 is linked to nucleotide 96 by nucleotides 82-84, 86-91, and 93-95.

[0825] In some embodiments, the shortened hairpin 1 region has a duplex portion of 7 base paired nucleotides in length. In some embodiments, the shortened hairpin 1 region has a duplex portion of 8 base paired nucleotides in length.

[0826] In the stem of the shortened hairpin 1 region is seven base paired nucleotides in length. In some embodiments, nucleotides 85-86 and nucleotides 91-92 of the shortened hairpin 1 region are deleted.

[0827] In some embodiments, the shortened hairpin 1 region has 13 modified nucleotides. In some embodiments, in the shortened hairpin 1 region, nucleotides 80, 81, 83, 84, 85, 87-90, 92-94, and 99 are modified nucleotides. In some embodiments, the modified nucleotides are 2′-O-Me modified nucleotides.

[0828] In some embodiments, between the shortened hairpin 1 region and the shortened hairpin 2 region, nucleotide 101 is a modified nucleotide. In some embodiments, the modified nucleotide is a 2′-O-Me modified nucleotide.

[0829] In some embodiments, the shortened hairpin 2 lacks 18 nucleotides. In some embodiments, the shortened hairpin 2 has 24 nucleotides. In some embodiments, in the shortened hairpin 2 nucleotides 113-121 and 126-134 are deleted relative to SEQ ID NO: 3126. In some embodiments, the shortened hairpin 2 lacks 18 nucleotides, and nucleotides 113-121 and 126-134 are deleted relative to SEQ ID NO: 3126. In some embodiments, in the shortened hairpin 2 region, nucleotide 112 is linked to nucleotide 135 by 4 nucleotides. In some embodiments, in the shortened hairpin 2 region, nucleotides 113-121 and 126-134 are deleted relative to SEQ ID NO: 3126 and nucleotide 112 is linked to nucleotide 135 by nucleotides 122-125. In some embodiments, in the shortened hairpin 2 region, nucleotides 112-120 and 127-135 are deleted relative to SEQ ID NO: 3126. In some embodiments, the shortened hairpin 2 region lacks 18 nucleotides, and nucleotides 112-120 and 127-135 are deleted relative to SEQ ID NO: 3126.

[0830] In some embodiments, the shortened repeat/anti-repeat region has a length of 28 nucleotides. In some embodiments, the shortened repeat/anti-repeat region has a length of 32 nucleotides.

[0831] In some embodiments, the upper stem of the shortened repeat/anti-repeat region comprises no more than one base pair. In some embodiments, the upper stem of the shortened repeat/anti-repeat region comprises no more than three base pairs.

[0832] In some embodiments, the shortened hairpin 2 region has 8 modified nucleotides. In some embodiments, the shortened hairpin 2 region has 9 modified nucleotides. In some embodiments, the shortened hairpin 2 region has 13 modified nucleotides. In some embodiments, in the shortened hairpin 2 region, nucleotides 104, 110, 111, 122-125, 142, and 143 are modified nucleotides. In some embodiments, in the shortened hairpin 2 region, nucleotides 104, 106-111, 122-125, 142, and 143 are modified nucleotides. In some embodiments, the modified nucleotides are 2′-O-Me modified nucleotides.

[0833] In some embodiments, in the shortened hairpin 2 region, nucleotide 141 is linked to nucleotide 142 by a PS linkage, and/or nucleotide 142 is linked to nucleotide 143 by a PS linkage.

[0834] In some embodiments, a guide RNA (gRNA) comprises a guide region and a conserved region, the conserved region comprising:
[0835] (a) a shortened repeat/anti-repeat region, wherein the shortened repeat/anti-repeat region lacks 18-22 nucleotides relative to SEQ ID NO: 3126, wherein
   [0836] (i) nucleotides 38-48 and 53-63 are deleted; and
   [0837] (ii) nucleotide 36 is linked to nucleotide 65 by 6-10 nucleotides;
[0838] (b) a shortened hairpin 1 region, wherein the shortened hairpin 1 lacks 2 nucleotides, wherein nucleotides 86 and 91 are deleted or nucleotides 85 and 92 are deleted relative to SEQ ID NO: 3126; and
[0839] (c) a shortened hairpin 2 region, wherein the shortened hairpin 2 lacks 18 nucleotides, wherein nucleotides 113-121 and 126-134 are deleted relative to SEQ ID NO: 3126; and wherein nucleotides 144-145 are deleted relative to SEQ ID NO: 3126; wherein at least 10 nucleotides are modified nucleotides.

[0840] In some embodiments, a guide RNA (gRNA) comprises a guide region and a conserved region, the conserved region comprising:
[0841] (a) a shortened repeat/anti-repeat region, wherein the shortened repeat/anti-repeat region lacks 18-22 nucleotides relative to SEQ ID NO: 3126, wherein
   [0842] (i) nucleotides 38, 41-48, 53-60, and 63 are deleted; and
   [0843] (ii) nucleotide 36 is linked to nucleotide 65 by 6-10 nucleotides;
[0844] (b) a shortened hairpin 1 region, wherein the shortened hairpin 1 lacks 2 nucleotides, wherein nucleotides 86 and 91 are deleted or nucleotides 85 and 92 are deleted relative to SEQ ID NO: 3126;
[0845] (c) a shortened hairpin 2 region, wherein the shortened hairpin 2 lacks 18 nucleotides, wherein nucleotides 113-121 and 126-134 are deleted relative to SEQ ID NO: 3126; and
[0846] wherein nucleotides 144-145 are deleted relative to SEQ ID NO: 3126;
[0847] wherein at least 10 nucleotides are modified nucleotides.

[0848] In some embodiments, a guide RNA (gRNA) is provided, the gRNA comprising a guide region and a conserved region, the conserved region comprising one or more of:
[0849] (a) a shortened repeat/anti-repeat region, wherein the shortened repeat/anti-repeat region lacks 18-22 nucleotides relative to SEQ ID NO: 3126, wherein
   [0850] (i) nucleotides 37-48 and 53-64 are deleted; and
   [0851] (ii) nucleotide 36 is linked to nucleotide 65 by 6-10 nucleotides; or
[0852] (b) a shortened hairpin 1 region, wherein the shortened hairpin 1 lacks 2 nucleotides, wherein nucleotides 86 and 91 are deleted or nucleotides 85 and 92 are deleted relative to SEQ ID NO: 3126; or
[0853] (c) a shortened hairpin 2 region, wherein the shortened hairpin 2 lacks 18 nucleotides, wherein nucleotides 113-121 and 126-134 are deleted relative to SEQ ID NO: 3126; and
[0854] wherein nucleotides 144-145 are deleted relative to SEQ ID NO: 3126;
[0855] wherein at least 10 nucleotides are modified nucleotides.

[0856] In further embodiments, the shortened repeat/anti-repeat region, wherein the shortened repeat/anti-repeat region lacks 22 nucleotides relative to SEQ ID NO: 3126. In further embodiments, nucleotide 36 is linked to nucleotide 65 by a sequence comprising the nucleotide sequence UGAAAC. In further embodiments, the nucleotide 36 is linked to nucleotide 65 by 10 nucleotides. In further embodiments, the nucleotide 36 is linked to nucleotide 65 by a sequence comprising the nucleotide sequence UUCGAAAGAC (SEQ ID NO: 3122).

[0857] In some embodiments, a guide RNA (gRNA) is provided, the gRNA comprising: a guide sequence comprising:
[0858] 2′-O-Me modified nucleotides at the first four nucleotides 1-4;
[0859] PS linkages between nucleotides 1-2, 2-3, and 3-4; and
[0860] 2′-O-Me modified nucleotides at nucleotides 5, 8, 9, 11, 13, 18, and 22 of the guide sequence;
   a shortened repeat/anti-repeat region, wherein nucleotides 38-48 and 53-63 are deleted relative to SEQ ID NO: 3126, comprising:
[0861] 2′-O-Me modified nucleotides at nucleotides 25, 29, 30, 31, 32, 37, 49-52, 64, 65, 69, 70, and 73;
   a PS linkage between nucleotides 76-77 between the shortened repeat/anti-repeat region and the shortened hairpin 1 region;
   a shortened hairpin 1 region, wherein nucleotides 86 and 91 are deleted relative to SEQ ID NO: 3126, comprising:
[0862] 2′-O-Me modified nucleotides at nucleotides 80, 81, 83, 84, 85, 87-90, 92-94, and 99; 2′-O-Me modified nucleotide at nucleotide 101 between the shortened hairpin 1 region and the shortened hairpin 2 region;
   a shortened hairpin 2 region, wherein nucleotides 112-120 and 127-135 are deleted relative to SEQ ID NO: 3126, comprising:
[0863] 2′-O-Me modified nucleotides at nucleotides 104, 110, 111, 122-125, 142, and 143,
[0864] PS linkages between nucleotides 141-142 and 142-143,
   wherein one or both nucleotides 144-145 are optionally deleted relative to SEQ ID NO: 3126.

[0865] In some embodiments, a guide RNA (gRNA) is provided, the gRNA comprising: a guide sequence comprising:
[0866] 2′-O-Me modified nucleotides at the first four nucleotides 1-4;
[0867] PS linkages between nucleotides 1-2, 2-3, and 3-4; and
[0868] 2′-O-Me modified nucleotides at nucleotides 5, 8, 9, 11, 13, 18, and 22 of the guide sequence;
   a shortened repeat/anti-repeat region, wherein nucleotides 38-48 and 53-63 are deleted relative to SEQ ID NO: 3126, comprising:
[0869] 2′-O-Me modified nucleotides at nucleotides 25, 29, 30, 31, 32, 37, 49-52, 64, 65, 69, 70, and 73;
   a shortened hairpin 1 region, wherein nucleotides 86 and 91 are deleted relative to SEQ ID NO: 3126, comprising:
[0870] 2′-O-Me modified nucleotides at nucleotides 80, 81, 83, 84, 85, 87-90, 92-94, and 99; 2′-O-Me modified nucleotide at nucleotide 101 between the shortened hairpin 1 region and the shortened hairpin 2 region;
   a shortened hairpin 2 region, wherein nucleotides 112-120 and 127-135 are deleted relative to SEQ ID NO: 3126, comprising:
[0871] 2′-O-Me modified nucleotides at nucleotides 104, 110, 111, 122-125, 142, and 143, PS linkages between nucleotides 141-142 and 142-143, wherein one or both nucleotides 144-145 are optionally deleted relative to SEQ ID NO: 3126.

[0872] In some embodiments, a guide RNA (gRNA) is provided, the gRNA comprising: a guide sequence comprising:
[0873] 2′-O-Me modified nucleotides at the first four nucleotides 1-4;
[0874] PS linkages between nucleotides 1-2, 2-3, and 3-4; and
[0875] 2′-O-Me modified nucleotides at nucleotides 5, 8, 9, 11, 13, 18, and 22 of the guide sequence;
   a shortened repeat/anti-repeat region, wherein nucleotides 38-48 and 53-63 are deleted relative to SEQ ID NO: 3126, comprising:
[0876] 2′-O-Me modified nucleotides at nucleotides 25, 29, 30, 31, 32, 37, 49-52, 64, 65, 69, 70, and 73;
   a PS linkage between nucleotides 76-77 between the shortened repeat/anti-repeat region and the shortened hairpin 1 region;
   a shortened hairpin 1 region, wherein nucleotides 86 and 91 are deleted relative to SEQ ID NO: 3126, comprising:
[0877] 2′-O-Me modified nucleotides at nucleotides 80, 81, 83, 84, 85, 87-90, 92-94, and 99; 2′-O-Me modified nucleotide at nucleotide 101 between the shortened hairpin 1 region and the shortened hairpin 2 region;
   a shortened hairpin 2 region, wherein nucleotides 112-120 and 127-135 are deleted relative to SEQ ID NO: 3126, comprising:
[0878] 2′-O-Me modified nucleotides at nucleotides 104, 106-111, 122-125, 142, and 143, PS linkages between nucleotides 141-142 and 142-143, wherein one or both nucleotides 144-145 are optionally deleted relative to SEQ ID NO: 3126.

[0879] In some embodiments, a guide RNA (gRNA) is provided, the gRNA comprising: a guide sequence comprising:
[0880] 2′-O-Me modified nucleotides at the first four nucleotides 1-4;
[0881] PS linkages between nucleotides 1-2, 2-3, and 3-4; and
[0882] 2′-O-Me modified nucleotides at nucleotides 5, 8, 9, 11, 13, 18, and 22 of the guide sequence;
   a shortened repeat/anti-repeat region, wherein nucleotides 38-48 and 53-63 are deleted relative to SEQ ID NO: 3126, comprising:
[0883] 2′-O-Me modified nucleotides at nucleotides 25, 29, 30, 31, 32, 37, 49-52, 64, 65, 69, 70, and 73;
   a shortened hairpin 1 region, wherein nucleotides 86 and 91 are deleted relative to SEQ ID NO: 3126, comprising:
[0884] 2′-O-Me modified nucleotides at nucleotides 80, 81, 83, 84, 85, 87-90, 92-94, and 99; 2′-O-Me modified nucleotide at nucleotide 101 between the shortened hairpin 1 region and the shortened hairpin 2 region;
   a shortened hairpin 2 region, wherein nucleotides 112-120 and 127-135 are deleted relative to SEQ ID NO: 3126, comprising:
[0885] 2′-O-Me modified nucleotides at nucleotides 104, 106-111, 122-125, 142, and 143,
[0886] PS linkages between nucleotides 141-142 and 142-143,
   wherein one or both nucleotides 144-145 are optionally deleted relative to SEQ ID NO: 3126.

[0887] In some embodiments, the guide RNA (gRNA) of the previous embodiment comprising a guide region and a conserved region, the conserved region comprising:
[0888] (a) a shortened repeat/anti-repeat region, wherein the shortened repeat/anti-repeat region lacks 18-22 nucleotides, wherein
   [0889] (i) nucleotides 37-48 and 53-64 are deleted relative to SEQ ID NO: 3126; and
   [0890] (ii) nucleotide 36 is linked to nucleotide 65 by 6-10 nucleotides;
[0891] (b) a shortened hairpin 1 region, wherein the shortened hairpin 1 lacks 2 nucleotides relative to SEQ ID NO: 3126, wherein nucleotides 86 and 91 are deleted or nucleotides 85 and 92 are deleted;
[0892] (c) a shortened hairpin 2 region, wherein the shortened hairpin 2 lacks 18 nucleotides, wherein nucleotides 113-121 and 126-134 are deleted relative to SEQ ID NO: 3126; and
[0893] (d) wherein nucleotides 144-145 are deleted relative to SEQ ID NO: 3126;
[0894] wherein at least 10 nucleotides are modified nucleotides.

[0895] In further embodiments, the shortened repeat/anti-repeat region, wherein the shortened repeat/anti-repeat region lacks 22 nucleotides relative to SEQ ID NO: 3126. In further embodiments, nucleotide 36 is linked to nucleotide 65 by a sequence comprising the nucleotide sequence UGAAAC. In further embodiments, the nucleotide 36 is linked to nucleotide 65 by 10 nucleotides. In further embodiments, the nucleotide 36 is linked to nucleotide 65 by a sequence comprising the nucleotide sequence UUCGAAAGAC (SEQ ID NO: 3122).

[0896] In some embodiments, the sgRNA comprises one of the following sequences in 5′ to 3′ orientation: (N)₂₀₋₂₅ GUUGUAGCUCCCUGAAACCGUUGCUACAAUAAGGCCGUCGAAAGAUGUGCCGC AACGCUCUGCCUUCUGGCAUCGUU (SEQ ID NO: 3119); (N)₂₀₋₂₅ GUUGUAGCUCCCUGAAACCGUUGCUACAAUAAGGCCGUCGAAAGAUGUGCCGC AACGCUCUGCCUUCUGGCAUCGUUUAUU (SEQ ID NO: 3120); (N)₂₀₋₂₅ GUUGUAGCUCCCUGGAAACCCGUUGCUACAAUAAGGCCGUCGAAAGAUGUGCC GCAACGCUCUGCCUUCUGGCAUCGUUUAUU (SEQ ID NO: 3121), where A, C, G, U, and N are adenine, cytosine, guanine, uracil, and any ribonucleotide, respectively, unless otherwise indicated. In some embodiments, N equals 24. In some embodiments, N equals 25.

[0897] In some embodiments, at least 10 nucleotides of the conserved portion of the sgRNA are modified nucleotides.

[0898] In some embodiments, the sgRNA comprises a conserved region comprising one of the following sequences in 5′ to 3′ orientation:

(SEQ ID NO: 707)
GUUGmUmAmGmCUCCCmUmGmAmAmAmCmCGUUmGmCUAmCAAU*AAGm
GmCCmGmUmCmGmAmAmAmGmAmUGUGCmCGCmAmAmCmGCUCUmGmCC
mUmUmCmUGmGCmAmUC*mG*mU*mU;
or
(SEQ ID NO: 710)
GUUGmUmAmGmCUCCCmUmGmAmAmAmCmCGUUmGmCUAmCAAU*AAGm
GmCCmGmUmCmGmAmAmAmGmAmUGUGCmCGmCAAmCGCUCUmGmCCmU
mUmCmUGGCAUCG*mU*mU;

or any other modified conserved region motifs disclosed in Table 9, including any one of SEQ ID NOs: 715-723, where A, C, G, U, and N are adenine, cytosine, guanine, uracil, and any ribonucleotide, respectively, unless otherwise indicated. An m is indicative of a 2′O-methyl modification, and an * is indicative of a phosphorothioate linkage between the nucleotides.

[0899] In certain embodiments, the HLA-B guide sequence is 20-25 nucleotides in length ((N)₂₀₋₂₅), wherein each nucleotide may be independently modified. In certain embodiments, each of nucleotides 1-3 of the 5′ end of the guide is independently modified. In certain embodiments, each of nucleotides 1-3 of the 5′ end of the guide is independently modified with a 2′-OMe modification. In certain embodiments, each of nucleotides 1-3 of the 5′ end of the guide is independently modified with a phosphorothioate linkage to the adjacent nucleotide residue. In certain embodiments, each of nucleotides 1-3 of the 5′ end of the guide is independently modified with a 2′-OMe modification and a phosphorothioate linkage to the adjacent nucleotide residue.

[0900] In some embodiments, the gRNA is chemically modified. A gRNA comprising one or more modified nucleosides or nucleotides is called a “modified” gRNA or “chemically modified” gRNA, to describe the presence of one or more non-naturally or naturally occurring components or configurations that are used instead of or in addition to the canonical A, G, C, and U residues. Modified nucleosides and nucleotides can include one or more of: (i) alteration, e.g., replacement, of one or both of the non-linking phosphate oxygens or of one or more of the linking phosphate oxygens in the phosphodiester backbone linkage (an exemplary backbone modification); (ii) alteration, e.g., replacement, of a constituent of the ribose sugar, e.g., of the 2′ hydroxyl on the ribose sugar (an exemplary sugar modification); (iii) wholesale replacement of the phosphate moiety with “dephospho” linkers (an exemplary backbone modification); (iv) modification or replacement of a naturally occurring nucleobase, including with a non-canonical nucleobase (an exemplary base modification); (v) replacement or modification of the ribose-phosphate backbone (an exemplary backbone modification); (vi) modification of the 3′ end or 5′ end of the oligonucleotide, e.g., removal, modification or replacement of a terminal phosphate group or conjugation of a moiety, cap or linker (such 3′ or 5′ cap modifications may comprise a sugar or backbone modification); and (vii) modification or replacement of the sugar (an exemplary sugar modification).

[0901] Chemical modifications such as those listed above can be combined to provide modified gRNAs comprising nucleosides and nucleotides (collectively “residues”) that can have two, three, four, or more modifications. For example, a modified residue can have a modified sugar and a modified nucleobase. In some embodiments, every base of a gRNA is modified, e.g., all bases have a modified phosphate group, such as a phosphorothioate group. In certain embodiments, all, or substantially all, of the phosphate groups of an gRNA molecule are replaced with phosphorothioate groups. In some embodiments, modified gRNAs comprise at least one modified residue at or near the 5′ end of the RNA. In some embodiments, modified gRNAs comprise at least one modified residue at or near the 3′ end of the RNA.

[0902] In some embodiments, the gRNA comprises one, two, three or more modified residues. In some embodiments, at least 5% (e.g., at least 5%, at least 10%, at least 15%, at least 20%, at least 25%, at least 30%, at least 35%, at least 40%, at least 45%, at least 50%, at least 55%, at least 60%, at least 65%, at least 70%, at least 75%, at least 80%, at least 85%, at least 90%, at least 95%, or 100%) of the positions in a modified gRNA are modified nucleosides or nucleotides.

[0903] In some embodiments of a backbone modification, the phosphate group of a modified residue can be modified by replacing one or more of the oxygens with a different substituent. Further, the modified residue, e.g., modified residue present in a modified nucleic acid, can include the wholesale replacement of an unmodified phosphate moiety with a modified phosphate group as described herein. In some embodiments, the backbone modification of the phosphate backbone can include alterations that result in either an uncharged linker or a charged linker with unsymmetrical charge distribution.

[0904] Examples of modified phosphate groups include phosphorothioate, phosphoroselenates, borano phosphates, borano phosphate esters, hydrogen phosphonates, phosphoroamidates, alkyl or aryl phosphonates and phosphotriesters.

[0905] Scaffolds that can mimic nucleic acids can also be constructed wherein the phosphate linker and ribose sugar are replaced by nuclease resistant nucleoside or nucleotide surrogates. Such modifications may comprise backbone and sugar modifications. In some embodiments, the nucleobases can be tethered by a surrogate backbone. Examples can include, without limitation, the morpholino, cyclobutyl, pyrrolidine and peptide nucleic acid (PNA) nucleoside surrogates.

[0906] The modified nucleosides and modified nucleotides can include one or more modifications to the sugar group, i.e. at sugar modification. For example, the 2′ hydroxyl group (OH) can be modified, e.g. replaced with a number of different “oxy” or “deoxy” substituents. In some embodiments, modifications to the 2′ hydroxyl group can enhance the stability of the nucleic acid since the hydroxyl can no longer be deprotonated to form a 2′-alkoxide ion. Examples of 2′ hydroxyl group modifications can include alkoxy or aryloxy (OR, wherein “R” can be, e.g., alkyl, cycloalkyl, aryl, aralkyl, heteroaryl or a sugar); polyethyleneglycols (PEG), O(CH₂CH₂O)ₙCH₂CH₂OR wherein R can be, e.g., H or optionally substituted alkyl, and n can be an integer from 0 to 20. In some embodiments, the 2′ hydroxyl group modification can be 2′-O-Me. In some embodiments, the 2′ hydroxyl group modification can be a 2′-fluoro modification, which replaces the 2′ hydroxyl group with a fluoride. In some embodiments, the 2′ hydroxyl group modification can include “locked” nucleic acids (LNA) in which the 2′ hydroxyl can be connected, e.g., by a C1-6 alkylene or C1-6 heteroalkylene bridge, to the 4′ carbon of the same ribose sugar, where exemplary bridges can include methylene, propylene, ether, or amino bridges. In some embodiments, the 2′ hydroxyl group modification can included “unlocked” nucleic acids (UNA) in which the ribose ring lacks the C2′-C3′ bond. In some embodiments, the 2′ hydroxyl group modification can include the methoxyethyl group (MOE), (OCH₂CH₂OCH₃, e.g., a PEG derivative).

[0907] “Deoxy” 2′ modifications can include hydrogen (i.e. deoxyribose sugars, e.g., at the overhang portions of partially dsRNA); halo (e.g., bromo, chloro, fluoro, or iodo); amino (wherein amino can be, e.g., NH2; alkylamino, dialkylamino, heterocyclyl, arylamino, diarylamino, heteroarylamino, diheteroarylamino, or amino acid); NH(CH₂CH₂NH)ₙCH2CH₂— amino (wherein amino can be, e.g., as described herein), —NHC(O)R (wherein R can be, e.g., alkyl, cycloalkyl, aryl, aralkyl, heteroaryl or sugar), cyano; mercapto; alkyl-thio-alkyl; thioalkoxy; and alkyl, cycloalkyl, aryl, alkenyl and alkynyl, which may be optionally substituted with e.g., an amino as described herein.

[0908] The sugar modification can comprise a sugar group which may also contain one or more carbons that possess the opposite stereochemical configuration than that of the corresponding carbon in ribose. Thus, a modified nucleic acid can include nucleotides containing e.g., arabinose, as the sugar. The modified nucleic acids can also include abasic sugars. These abasic sugars can also be further modified at one or more of the constituent sugar atoms. The modified nucleic acids can also include one or more sugars that are in the L form, e.g. L-nucleosides.

[0909] The modified nucleosides and modified nucleotides described herein, which can be incorporated into a modified nucleic acid, can include a modified base, also called a nucleobase. Examples of nucleobases include, but are not limited to, adenine (A), guanine (G), cytosine (C), and uracil (U). These nucleobases can be modified or wholly replaced to provide modified residues that can be incorporated into modified nucleic acids. The nucleobase of the nucleotide can be independently selected from a purine, a pyrimidine, a purine analog, or pyrimidine analog. In some embodiments, the nucleobase can include, for example, naturally-occurring and synthetic derivatives of a base.

[0910] In embodiments employing a dual guide RNA, each of the crRNA and the tracr RNA can contain modifications. Such modifications may be at one or both ends of the crRNA or tracr RNA. In embodiments comprising an sgRNA, one or more residues at one or both ends of the sgRNA may be chemically modified, or the entire sgRNA may be chemically modified. Certain embodiments comprise a 5′ end modification. Certain embodiments comprise a 3′ end modification. In certain embodiments, one or more or all of the nucleotides in single stranded overhang of a gRNA molecule are deoxynucleotides.

[0911] In some embodiments, the gRNAs disclosed herein comprise one of the modification patterns disclosed in WO2018/107028 A1, published Jun. 14, 2018 the contents of which are hereby incorporated by reference in their entirety.

[0912] The terms “mA,” “mC,” “mU,” or “mG” may be used to denote a nucleotide that has been modified with 2′-O-Me. The terms “TA,” “fC,” “fU,” or “fG” may be used to denote a nucleotide that has been substituted with 2′-F. A “*” may be used to depict a PS modification. The terms A*, C*, U*, or G* may be used to denote a nucleotide that is linked to the next (e.g., 3′) nucleotide with a PS bond. The terms “mA*,” “mC*,” “mU*,” or “mG*” may be used to denote a nucleotide that has been substituted with 2′-O-Me and that is linked to the next (e.g., 3′) nucleotide with a PS bond.

TABLE 8A
Exemplary spyCas9 sgRNA-1 (SEQ ID NO: 600)

| 1 | 2 | 3 | 4 | 5 | 6 | 7 | 8 | 9 | 10 | 11 | 12 | 13 | 14 | 15 | 16 | 17 | 18 | 19 | 20 | 21 | 22 | 23 | 24 | 25 | 26 | 27 | 28 | 29 | 30 |
|---|---|---|---|---|---|---|---|---|---|---|---|---|---|---|---|---|---|---|---|---|---|---|---|---|---|---|---|---|---|
| G | U | U | U | U | A | G | A | G | C | U | A | G | A | A | A | U | A | G | C | A | A | G | U | U | A | A | A | A | U |
| LS1-LS6 | | | | | | B1-B2 | | US1-US12 | | | | | | | | | | | | B3-B6 | | | | LS7-LS12 | | | | | |
| 31 | 32 | 33 | 34 | 35 | 36 | 37 | 38 | 39 | 40 | 41 | 42 | 43 | 44 | 45 | 46 | 47 | 48 | 49 | 50 | 51 | 52 | 53 | 54 | 55 | 56 | 57 | 58 | 59 | 60 |
| A | A | G | G | C | U | A | G | U | CC | | G | U | U | A | U | C | A | A | C | U | U | G | A | A | A | A | A | G | U |

| Nexus | | | | | | | | | H1-1 through H1-12 | | | | | | |
|---|---|---|---|---|---|---|---|---|---|---|---|---|---|---|---|
| 61 | 62 | 63 | 64 | 65 | 66 | 67 | 68 | 69 | 70 | 71 | 72 | 73 | 74 | 75 | 76 |
| G | G | C | A | C | C | G | A | G | U | C | G | G | U | G | C |

| | |
|---|---|
| N | H2-1 through H2-15 |

TABLE 8B
exemplary NmeCas9 sgRNA (SEQ ID NO: 3126)

| 1-24 | | | | 25 | 26 | 27 | 28 | 29 | 30 | 31 | 32 | 33 | 34 |
|---|---|---|---|---|---|---|---|---|---|---|---|---|---|
| NNNNNNNNNNNNNNN | | | | G | U | U | G | U | A | G | C | U | C |
| NNNNNNNNN | | | | | | | | | | | | | |
| | | | | Lower stem | | | | | | | | | |
| Guide region | | | | Repeat/Anti-Repeat region | | | | | | | | | |
| 35 | 36 | 37 | 38 | 39 | 40 | 41 | 42 | 43 | 44 | 45 | 46 | 47 | 48 |
| C | C | U | U | U | C | U | C | A | U | U | U | C | G |

Upper stem

Repeat/Anti-Repeat region

| 49 | 50 | 51 | 52 | 53 | 54 | 55 | 56 | 57 | 58 | 59 | 60 | 61 | 62 |
|---|---|---|---|---|---|---|---|---|---|---|---|---|---|
| G | A | A | A | C | G | A | A | A | U | G | A | G | A |

| | |
|---|---|
| Loop | Upper stem |

Repeat/Anti-Repeat region

| 63 | 64 | 65 | 66 | 67 | 68 | 69 | 70 | 71 | 72 | 73 | 74 | 75 | 76 |
|---|---|---|---|---|---|---|---|---|---|---|---|---|---|
| A | C | C | G | U | U | G | C | U | A | C | A | A | U |

Lower Stem

Repeat/Anti-Repeat region

| 77 | 78 | 79 | 80 | 81 | 82 | 83 | 84 | 85 | 86 | 87 | 88 | 89 | 90 |
|---|---|---|---|---|---|---|---|---|---|---|---|---|---|
| A | A | G | G | C | C | G | U | C | U | G | A | A | A |
| | Stem | | | | | | | | | Loop | | | |
| | Hairpin 1 | | | | | | | | | | | | |
| 91 | 92 | 93 | 94 | 95 | 96 | 97 | 98 | 99 | 100 | 101 | 102 | 103 | 104 |
| A | G | A | U | G | U | G | C | C | G | C | A | A | C |
| Stem (96: unpaired) | | | | | | | | | | | Lower stem | | |
| Hairpin 1 | | | | | | | | | | | Hairpin 2 | | |
| 105 | 106 | 107 | 108 | 109 | 110 | 111 | 112 | 113 | 114 | 115 | 116 | 117 | 118 |
| G | C | U | C | U | G | C | C | C | C | U | U | A | A |

| | |
|---|---|
| Bulge | Upper Stem |

Hairpin 2

| 119 | 120 | 121 | 122 | 123 | 124 | 125 | 126 | 127 | 128 | 129 | 130 | 131 | 132 |
|---|---|---|---|---|---|---|---|---|---|---|---|---|---|
| A | G | C | U | U | C | U | G | C | U | U | U | A | A |

| | |
|---|---|
| Loop | Upper Stem |

Hairpin 2

| 133 | 134 | 135 | 136 | 137 | 138 | 139 | 140 | 141 | 142 | 143 | 144 | 145 |
|---|---|---|---|---|---|---|---|---|---|---|---|---|
| G | G | G | G | C | A | U | C | G | U | U | U | A |

| | | |
|---|---|---|
| Upper Stem | Bulge | Lower Stem |

Hairpin 2

### I. Ribonucleoprotein Complex

[0913] In some embodiments, the disclosure provides compositions comprising one or more gRNAs comprising one or more guide sequences from Tables 2-7 and an RNA-guided DNA binding agent, e.g., a nuclease, such as a Cas nuclease, such as Cas9. In some embodiments, the RNA-guided DNA-binding agent has cleavase activity, which can also be referred to as double-strand endonuclease activity. In some embodiments, the RNA-guided DNA-binding agent comprises a Cas nuclease. Examples of Cas9 nucleases include those of the type II CRISPR systems of S. pyogenes, N. meningitidis, S. aureus, and other prokaryotes (see e.g., the list in the next paragraph), and modified (e.g., engineered or mutant) versions thereof. See e.g., US2016/0312198 A1; US 2016/0312199 A1. Other examples of Cas nucleases include a Csm or Cmr complex of a type III CRISPR system or the Cas10, Csm1, or Cmr2 subunit thereof; and a Cascade complex of a type I CRISPR system, or the Cas3 subunit thereof. In some embodiments, the Cas nuclease may be from a Type-IIA, Type-IIB, or Type-IIC system. For discussion of various CRISPR systems and Cas nucleases see, e.g., Makarova et al., NAT. REV. MICROBIOL. 9:467-477 (2011); Makarova et al., NAT. REV. MICROBIOL, 13: 722-36 (2015); Shmakov et al., MOLECULAR CELL, 60:385-397 (2015). In some embodiments, the RNA-guided DNA-binding agent comprises a Cas nickase. In some embodiments, the RNA-guided nickase is modified or derived from a Cas protein, such as a Class 2 Cas nuclease (which may be, e.g., a Cas nuclease of Type II, V, or VI). Class 2 Cas nuclease include, for example, Cas9, Cpf1, C2c1, C2c2, and C2c3 proteins and modifications thereof.

[0914] Non-limiting exemplary species that the Cas nuclease or Cas nickase can be derived from include Streptococcus pyogenes, Streptococcus thermophilus, Streptococcus sp., Staphylococcus aureus, Listeria innocua, Lactobacillus gasseri, Francisella novicida, Wolinella succinogenes, Sutterella wadsworthensis, Gamma proteobacterium, Neisseria meningitidis, Campylobacter jejuni, Pasteurella multocida, Fibrobacter succinogene, Rhodospirillum rubrum, Nocardiopsis dassonvillei, Streptomyces pristinaespiralis, Streptomyces viridochromogenes, Streptomyces viridochromogenes, Streptosporangium roseum, Streptosporangium roseum, Alicyclobacillus acidocaldarius, Bacillus pseudomycoides, Bacillus selenitireducens, Exiguobacterium sibiricum, Lactobacillus delbrueckii, Lactobacillus salivarius, Lactobacillus buchneri, Treponema denticola, Microscilla marina, Burkholderiales bacterium, Polaromonas naphthalenivorans, Polaromonas sp., Crocosphaera watsonii, Cyanothece sp., Microcystis aeruginosa, Synechococcus sp., Acetohalobium arabaticum, Ammonifex degensii, Caldicelulosiruptor becscii, Candidatus Desulforudis, Clostridium botulinum, Clostridium difficile, Finegoldia magna, Natranaerobius thermophilus, Pelotomaculum thermopropionicum, Acidithiobacillus caldus, Acidithiobacillus ferrooxidans, Allochromatium vinosum, Marinobacter sp., Nitrosococcus halophilus, Nitrosococcus watsoni, Pseudoalteromonas haloplanktis, Ktedonobacter racemifer, Methanohalobium evestigatum, Anabaena variabilis, Nodularia spumigena, Nostoc sp., Arthrospira maxima, Arthrospira platensis, Arthrospira sp., Lyngbya sp., Microcoleus chthonoplastes, Oscillatoria sp., Petrotoga mobilis, Thermosipho africanus, Streptococcus pasteurianus, Neisseria cinerea, Campylobacter lari, Parvibaculum lavamentivorans, Corynebacterium diphtheria, Acidaminococcus sp., Lachnospiraceae bacterium ND2006, and Acaryochloris marina.

[0915] In some embodiments, the Cas nuclease is the Cas9 nuclease from Streptococcus pyogenes. In some embodiments, the Cas nuclease is the Cas9 nuclease from Streptococcus thermophilus. In some embodiments, the Cas nuclease is the Cas9 nuclease from Neisseria meningitidis. In some embodiments, the Cas nuclease is the Cas9 nuclease is from Staphylococcus aureus. In some embodiments, the Cas nuclease is the Cpf1 nuclease from Francisella novicida. In some embodiments, the Cas nuclease is the Cpf1 nuclease from Acidaminococcus sp. In some embodiments, the Cas nuclease is the Cpf1 nuclease from Lachnospiraceae bacterium ND2006. In further embodiments, the Cas nuclease is the Cpf1 nuclease from Francisella tularensis, Lachnospiraceae bacterium, Butyrivibrio proteoclasticus, Peregrinibacteria bacterium, Parcubacteria bacterium, Smithella, Acidaminococcus, Candidatus Methanoplasma termitum, Eubacterium eligens, Moraxella bovoculi, Leptospira inadai, Porphyromonas crevioricanis, Prevotella disiens, or Porphyromonas macacae. In certain embodiments, the Cas nuclease is a Cpf1 nuclease from an Acidaminococcus or Lachnospiraceae.

[0916] In some embodiments, the Cas nickase is derived from the Cas9 nuclease from Streptococcus pyogenes. In some embodiments, the Cas nickase is derived from the Cas9 nuclease from Streptococcus thermophilus. In some embodiments, the Cas nickase is a nickase form of the Cas9 nuclease from Neisseria meningitidis. See e.g., WO/2020081568, describing an Nme2Cas9 D16A nickase fusion protein. In some embodiments, the Cas nickase is derived from the Cas9 nuclease is from Staphylococcus aureus. In some embodiments, the Cas nickase is derived from the Cpf1 nuclease from Francisella novicida. In some embodiments, the Cas nickase is derived from the Cpf1 nuclease from Acidaminococcus sp. In some embodiments, the Cas nickase is derived from the Cpf1 nuclease from Lachnospiraceae bacterium ND2006. In further embodiments, the Cas nickase is derived from the Cpf1 nuclease from Francisella tularensis, Lachnospiraceae bacterium, Butyrivibrio proteoclasticus, Peregrinibacteria bacterium, Parcubacteria bacterium, Smithella, Acidaminococcus, Candidatus Methanoplasma termitum, Eubacterium eligens, Moraxella bovoculi, Leptospira inadai, Porphyromonas crevioricanis, Prevotella disiens, or Porphyromonas macacae. In certain embodiments, the Cas nickase is derived from a Cpf1 nuclease from an Acidaminococcus or Lachnospiraceae. As discussed elsewhere, a nickase may be derived from a nuclease by inactivating one of the two catalytic domains, e.g., by mutating an active site residue essential for nucleolysis, such as D10, H840, of N863 in Spy Cas9. One skilled in the art will be familiar with techniques for easily identifying corresponding residues in other Cas proteins, such as sequence alignment and structural alignment, which is discussed in detail below.

[0917] In some embodiments, the gRNA together with an RNA-guided DNA binding agent is called a ribonucleoprotein complex (RNP). In some embodiments, the RNA-guided DNA binding agent is a Cas nuclease. In some embodiments, the gRNA together with a Cas nuclease is called a Cas RNP. In some embodiments, the RNP comprises Type-I, Type-II, or Type-III components. In some embodiments, the Cas nuclease is the Cas9 protein from the Type-II CRISPR/Cas system. In some embodiment, the gRNA together with Cas9 is called a Cas9 RNP.

[0918] Wild type Cas9 has two nuclease domains: RuvC and HNH. The RuvC domain cleaves the non-target DNA strand, and the HNH domain cleaves the target strand of DNA. In some embodiments, the Cas9 protein comprises more than one RuvC domain or more than one HNH domain. In some embodiments, the Cas9 protein is a wild type Cas9. In each of the composition, use, and method embodiments, the Cas induces a double strand break in target DNA.

[0919] In some embodiments, chimeric Cas nucleases are used, where one domain or region of the protein is replaced by a portion of a different protein. In some embodiments, a Cas nuclease domain may be replaced with a domain from a different nuclease such as Fok1. In some embodiments, a Cas nuclease may be a modified nuclease.

[0920] In other embodiments, the Cas nuclease or Cas nickase may be from a Type-I CRISPR/Cas system. In some embodiments, the Cas nuclease may be a component of the Cascade complex of a Type-I CRISPR/Cas system. In some embodiments, the Cas nuclease may be a Cas3 protein. In some embodiments, the Cas nuclease may be from a Type-III CRISPR/Cas system. In some embodiments, the Cas nuclease may have an RNA cleavage activity.

[0921] In some embodiments, the RNA-guided DNA-binding agent has single-strand nickase activity, i.e., can cut one DNA strand to produce a single-strand break, also known as a “nick.” In some embodiments, the RNA-guided DNA-binding agent comprises a Cas nickase. A nickase is an enzyme that creates a nick in dsDNA, i.e., cuts one strand but not the other of the DNA double helix. In some embodiments, a Cas nickase is a version of a Cas nuclease (e.g., a Cas nuclease discussed above) in which an endonucleolytic active site is inactivated, e.g., by one or more alterations (e.g., point mutations) in a catalytic domain. See e.g., U.S. Pat. No. 8,889,356 for discussion of Cas nickases and exemplary catalytic domain alterations. In some embodiments, a Cas nickase such as a Cas9 nickase has an inactivated RuvC or HNH domain.

[0922] In some embodiments, the RNA-guided DNA-binding agent is modified to contain only one functional nuclease domain. For example, the agent protein may be modified such that one of the nuclease domains is mutated or fully or partially deleted to reduce its nucleic acid cleavage activity. In some embodiments, a nickase is used having a RuvC domain with reduced activity. In some embodiments, a nickase is used having an inactive RuvC domain. In some embodiments, a nickase is used having an HNH domain with reduced activity. In some embodiments, a nickase is used having an inactive HNH domain.

[0923] In some embodiments, a conserved amino acid within a Cas protein nuclease domain is substituted to reduce or alter nuclease activity. In some embodiments, a Cas nuclease may comprise an amino acid substitution in the RuvC or RuvC-like nuclease domain. Exemplary amino acid substitutions in the RuvC or RuvC-like nuclease domain include D10A (based on the S. pyogenes Cas9 protein). See, e.g., Zetsche et al. (2015) Cell October 22:163(3): 759-771. In some embodiments, the Cas nuclease may comprise an amino acid substitution in the HNH or HNH-like nuclease domain. Exemplary amino acid substitutions in the HNH or HNH-like nuclease domain include E762A, H840A, N863A, H983A, and D986A (based on the S. pyogenes Cas9 protein. See, e.g., Zetsche et al. (2015). Exemplary amino acid substitutions in the HNH or HNH-like nuclease domain or RuvC or RuvC-like domains for N. meningitidis include Nme2Cas9D16A (HNH nickase) and Nme2Cas9H588A (RuvC nickase). Further exemplary amino acid substitutions include D917A, E1006A, and D1255A (based on the Francisella novicida U112 Cpf1 (FnCpf1) sequence (UniProtKB—A0Q7Q2 (CPF1_FRATN)).

[0924] In some embodiments, an mRNA encoding a nickase is provided in combination with a pair of guide RNAs that are complementary to the sense and antisense strands of the target sequence, respectively. In this embodiment, the guide RNAs direct the nickase to a target sequence and introduce a DSB by generating a nick on opposite strands of the target sequence (i.e., double nicking). In some embodiments, use of double nicking may improve specificity and reduce off-target effects. In some embodiments, a nickase is used together with two separate guide RNAs targeting opposite strands of DNA to produce a double nick in the target DNA. In some embodiments, a nickase is used together with two separate guide RNAs that are selected to be in close proximity to produce a double nick in the target DNA.

[0925] In some embodiments, the RNA-guided DNA-binding agent lacks cleavase and nickase activity. In some embodiments, the RNA-guided DNA-binding agent comprises a dCas DNA-binding polypeptide. A dCas polypeptide has DNA-binding activity while essentially lacking catalytic (cleavase/nickase) activity. In some embodiments, the dCas polypeptide is a dCas9 polypeptide. In some embodiments, the RNA-guided DNA-binding agent lacking cleavase and nickase activity or the dCas DNA-binding polypeptide is a version of a Cas nuclease (e.g., a Cas nuclease discussed above) in which its endonucleolytic active sites are inactivated, e.g., by one or more alterations (e.g., point mutations) in its catalytic domains. See, e.g., US 2014/0186958 A1; US 2015/0166980 A1.

[0926] In some embodiments, the RNA-guided DNA binding agent comprises one or more heterologous functional domains (e.g., is or comprises a fusion polypeptide).

[0927] In some embodiments, the RNA-guided DNA binding agent comprises a APOBEC3 deaminase. In some embodiments, a APOBEC3 deaminase is a APOBEC3A (A3A). In some embodiments, the A3A is a human A3A. In some embodiments, the A3A is a wild-type A3A.

[0928] In some embodiments, the RNA-guided DNA binding agent comprises a deaminase and an RNA-guided nickase. In some embodiments, the mRNA further comprises a linker to link the sequencing encoding A3A to the sequence sequencing encoding RNA-guided nickase. In some embodiments, the linker is an organic molecule, group, polymer, or chemical moiety. In some embodiments, the linker is a peptide linker. In some embodiments, the peptide linker is any stretch of amino acids having at least 1, at least 2, at least 3, at least 4, at least 5, at least 6, at least 7, at least 8, at least 9, at least 10, at least 15, at least 20, at least 25, at least 30, at least 40, at least 50, or more amino acids. In some embodiments, the peptide linker is the 16 residue “XTEN” linker, or a variant thereof (See, e.g., the Examples; and Schellenberger et al. A recombinant polypeptide extends the in vivo half-life of peptides and proteins in a tunable manner. Nat. Biotechnol. 27, 1186-1190 (2009)). In some embodiments, the XTEN linker comprises the sequence SGSETPGTSESATPES (SEQ ID NO: 900), SGSETPGTSESA (SEQ ID NO: 901), or SGSETPGTSESATPEGGSGGS (SEQ ID NO: 902).

[0929] In some embodiments, the peptide linker comprises a (GGGGS)ₙ (SEQ ID NO: 910), a (G)ₙ, an (EAAAK)ₙ (SEQ ID NO: 911), a (GGS)ₙ, an SGSETPGTSESATPES (SEQ ID NO: 906) motif (see, e.g., Guilinger J P, Thompson D B, Liu D R. Fusion of catalytically inactive Cas9 to FokI nuclease improves the specificity of genome modification. Nat. Biotechnol. 2014; 32(6): 577-82; the entire contents are incorporated herein by reference), or an (XP)ₙ motif, or a combination of any of these, wherein n is independently an integer between 1 and 30 (SEQ DI NO: 3123). See, WO2015089406, e.g., paragraph [0012], the entire content of which is incorporated herein by reference.

[0930] In some embodiments, the peptide linker comprises one or more sequences selected from SEQ ID NOs: 906-970.

[0931] In some embodiments, the heterologous functional domain may facilitate transport of the RNA-guided DNA-binding agent into the nucleus of a cell. For example, the heterologous functional domain may be a nuclear localization signal (NLS). In some embodiments, the RNA-guided DNA-binding agent may be fused with 1-10 NLS(s). In some embodiments, the RNA-guided DNA-binding agent may be fused with 1-5 NLS(s). In some embodiments, the RNA-guided DNA-binding agent may be fused with one NLS. Where one NLS is used, the NLS may be fused at the N-terminus or the C-terminus of the RNA-guided DNA-binding agent sequence. In some embodiments, the NLS is not fused to the C-terminus. It may also be inserted within the RNA-guided DNA binding agent sequence. In other embodiments, the RNA-guided DNA-binding agent may be fused with more than one NLS. In some embodiments, the RNA-guided DNA-binding agent may be fused with 2, 3, 4, or 5 NLSs. In some embodiments, the RNA-guided DNA-binding agent may be fused with two NLSs. In certain circumstances, the two NLSs may be the same (e.g., two SV40 NLSs) or different. In some embodiments, the RNA-guided DNA-binding agent is fused to two NLS sequences (e.g., SV40) fused at the carboxy terminus. In some embodiments, the RNA-guided DNA-binding agent may be fused with two NLSs, one at the N-terminus and one at the C-terminus. In some embodiments, the RNA-guided DNA-binding agent may be fused with 3 NLSs. In some embodiments, the RNA-guided DNA-binding agent may be fused with no NLS. In some embodiments, the NLS may be a monopartite sequence, such as, e.g., the SV40 NLS, PKKKRKV (SEQ ID NO: 903) or PKKKRRV (SEQ ID NO: 904). In some embodiments, the NLS may be a bipartite sequence, such as the NLS of nucleoplasmin, KRPAATKKAGQAKKKK (SEQ ID NO: 905). In a specific embodiment, a single PKKKRKV (SEQ ID NO: 903) NLS may be fused at the C-terminus of the RNA-guided DNA-binding agent. One or more linkers are optionally included at the fusion site.

[0932] In some embodiments, the RNA-guided DNA binding agent comprises an editor. An exemplary editor is BC22n which includes a H. sapiens APOBEC3A fused to S. pyogenes-DIOA Cas9 nickase by an XTEN linker, and mRNA encoding BC22n. An mRNA encoding BC22n is provided (SEQ ID NO: 804).

[0933] In some embodiments, the heterologous functional domain may be capable of modifying the intracellular half-life of the RNA-guided DNA binding agent. In some embodiments, the half-life of the RNA-guided DNA binding agent may be increased. In some embodiments, the half-life of the RNA-guided DNA-binding agent may be reduced. In some embodiments, the heterologous functional domain may be capable of increasing the stability of the RNA-guided DNA-binding agent. In some embodiments, the heterologous functional domain may be capable of reducing the stability of the RNA-guided DNA-binding agent. In some embodiments, the heterologous functional domain may act as a signal peptide for protein degradation. In some embodiments, the protein degradation may be mediated by proteolytic enzymes, such as, for example, proteasomes, lysosomal proteases, or calpain proteases. In some embodiments, the heterologous functional domain may comprise a PEST sequence. In some embodiments, the RNA-guided DNA-binding agent may be modified by addition of ubiquitin or a polyubiquitin chain. In some embodiments, the ubiquitin may be a ubiquitin-like protein (UBL). Non-limiting examples of ubiquitin-like proteins include small ubiquitin-like modifier (SUMO), ubiquitin cross-reactive protein (UCRP, also known as interferon-stimulated gene-15 (ISG15)), ubiquitin-related modifier-1 (URM1), neuronal-precursor-cell-expressed developmentally downregulated protein-8 (NEDD8, also called Rub1 in S. cerevisiae), human leukocyte antigen F-associated (FAT10), autophagy-8 (ATG8) and -12 (ATG12), Fau ubiquitin-like protein (FUBI), membrane-anchored UBL (MUB), ubiquitin fold-modifier-1 (UFMI), and ubiquitin-like protein-5 (UBL5).

[0934] In some embodiments, the heterologous functional domain may be a marker domain. Non-limiting examples of marker domains include fluorescent proteins, purification tags, epitope tags, and reporter gene sequences. In some embodiments, the marker domain may be a fluorescent protein. Non-limiting examples of suitable fluorescent proteins include green fluorescent proteins (e.g., GFP, GFP-2, tagGFP, turboGFP, sfGFP, EGFP, Emerald, Azami Green, Monomeric Azami Green, CopGFP, AceGFP, ZsGreen1), yellow fluorescent proteins (e.g., YFP, EYFP, Citrine, Venus, YPet, PhiYFP, ZsYellow1), blue fluorescent proteins (e.g., EBFP, EBFP2, Azurite, mKalamal, GFPuv, Sapphire, T-sapphire), cyan fluorescent proteins (e.g., ECFP, Cerulean, CyPet, AmCyan1, Midoriishi-Cyan), red fluorescent proteins (e.g., mKate, mKate2, mPlum, DsRed monomer, mCherry, mRFP1, DsRed-Express, DsRed2, DsRed-Monomer, HcRed-Tandem, HcRed1, AsRed2, eqFP611, mRasberry, mStrawberry, Jred), and orange fluorescent proteins (mOrange, mKO, Kusabira-Orange, Monomeric Kusabira-Orange, mTangerine, tdTomato) or any other suitable fluorescent protein. In other embodiments, the marker domain may be a purification tag or an epitope tag. Non-limiting exemplary tags include glutathione-S-transferase (GST), chitin binding protein (CBP), maltose binding protein (MBP), thioredoxin (TRX), poly(NANP), tandem affinity purification (TAP) tag, myc, AcV5, AU1, AU5, E, ECS, E2, FLAG, HA, nus, Softag 1, Softag 3, Strep, SBP, Glu-Glu, HSV, KT3, S, S1, T7, V5, VSV-G, 6×His (SEQ ID NO: 3124), 8×His (SEQ ID NO: 3125), biotin carboxyl carrier protein (BCCP), poly-His, and calmodulin. Non-limiting exemplary reporter genes include glutathione-S-transferase (GST), horseradish peroxidase (HRP), chloramphenicol acetyltransferase (CAT), beta-galactosidase, beta-glucuronidase, luciferase, or fluorescent proteins.

[0935] In additional embodiments, the heterologous functional domain may target the RNA-guided DNA-binding agent to a specific organelle, cell type, tissue, or organ. In some embodiments, the heterologous functional domain may target the RNA-guided DNA-binding agent to mitochondria.

[0936] In further embodiments, the heterologous functional domain may be an effector domain such as an editor domain. When the RNA-guided DNA-binding agent is directed to its target sequence, e.g., when a Cas nuclease is directed to a target sequence by a gRNA, the effector such as an editor domain may modify or affect the target sequence. In some embodiments, the effector such as an editor domain may be chosen from a nucleic acid binding domain, a nuclease domain (e.g., a non-Cas nuclease domain), an epigenetic modification domain, a transcriptional activation domain, or a transcriptional repressor domain. In some embodiments, the heterologous functional domain is a nuclease, such as a FokI nuclease. See, e.g., U.S. Pat. No. 9,023,649. In some embodiments, the heterologous functional domain is a transcriptional activator or repressor. See, e.g., Qi et al., “Repurposing CRISPR as an RNA-guided platform for sequence-specific control of gene expression,” Cell 152:1173-83 (2013); Perez-Pinera et al., “RNA-guided gene activation by CRISPR-Cas9-based transcription factors,” Nat. Methods 10:973-6 (2013); Mali et al., “CAS9 transcriptional activators for target specificity screening and paired nickases for cooperative genome engineering,” Nat. Biotechnol. 31:833-8 (2013); Gilbert et al., “CRISPR-mediated modular RNA-guided regulation of transcription in eukaryotes,” Cell 154:442-51 (2013). As such, the RNA-guided DNA-binding agent essentially becomes a transcription factor that can be directed to bind a desired target sequence using a guide RNA.

### J. Determination of Efficacy of Guide RNAs

[0937] In some embodiments, the efficacy of a guide RNA is determined when delivered or expressed together with other components (e.g., an RNA-guided DNA binding agent) forming an RNP. In some embodiments, the guide RNA is expressed together with an RNA-guided DNA binding agent, such as a Cas protein, e.g., Cas9. In some embodiments, the guide RNA is delivered to or expressed in a cell line that already stably expresses an RNA-guided DNA nuclease, such as a Cas nuclease or nickase, e.g., Cas9 nuclease or nickase. In some embodiments the guide RNA is delivered to a cell as part of a RNP. In some embodiments, the guide RNA is delivered to a cell along with a mRNA encoding an RNA-guided DNA nuclease, such as a Cas nuclease or nickase, e.g., Cas9 nuclease or nickase.

[0938] As described herein, use of an RNA-guided DNA nuclease and a guide RNA disclosed herein can lead to DSBs, SSBs, or site-specific binding that results in nucleic acid modification in the DNA or pre-mRNA which can produce errors in the form of insertion/deletion (indel) mutations upon repair by cellular machinery. Many mutations due to indels alter the reading frame, introduce premature stop codons, or induce exon skipping and, therefore, produce a non-functional protein.

[0939] In some embodiments, the efficacy of particular guide RNAs is determined based on in vitro models. In some embodiments, the in vitro model is T cell line. In some embodiments, the in vitro model is HEK293 T cells. In some embodiments, the in vitro model is HEK293 cells stably expressing Cas9 (HEK293_Cas9). In some embodiments, the in vitro model is a lymphoblastoid cell line. In some embodiments, the in vitro model is primary human T cells. In some embodiments, the in vitro model is primary human B cells. In some embodiments, the in vitro model is primary human peripheral blood lymphocytes. In some embodiments, the in vitro model is primary human peripheral blood mononuclear cells.

[0940] In some embodiments, the number of off-target sites at which a deletion or insertion occurs in an in vitro model is determined, e.g., by analyzing genomic DNA from the cells transfected in vitro with Cas9 mRNA and the guide RNA. In some embodiments, such a determination comprises analyzing genomic DNA from cells transfected in vitro with Cas9 mRNA, the guide RNA, and a donor oligonucleotide. Exemplary procedures for such determinations are provided in the working examples below.

[0941] In some embodiments, the efficacy of particular gRNAs is determined across multiple in vitro cell models for a guide RNA selection process. In some embodiments, a cell line comparison of data with selected guide RNAs is performed. In some embodiments, cross screening in multiple cell models is performed.

[0942] In some embodiments, the efficacy of a guide RNA is evaluated by on target cleavage efficiency. In some embodiments, the efficacy of a guide RNA is measured by percent editing at the target location, e.g., HLA-A, HLA-B, or CIITA. In some embodiments, deep sequencing may be utilized to identify the presence of modifications (e.g., insertions, deletions) introduced by gene editing. Indel percentage can be calculated from next generation sequencing “NGS.”

[0943] In some embodiments, the efficacy of a guide RNA is measured by the number or frequency of indels at off-target sequences within the genome of the target cell type. In some embodiments, efficacious guide RNAs are provided which produce indels at off target sites at very low frequencies (e.g., <5%) in a cell population or relative to the frequency of indel creation at the target site. Thus, the disclosure provides for guide RNAs which do not exhibit off-target indel formation in the target cell type (e.g., T cells or B cells), or which produce a frequency of off-target indel formation of <5% in a cell population or relative to the frequency of indel creation at the target site. In some embodiments, the disclosure provides guide RNAs which do not exhibit any off target indel formation in the target cell type (e.g., T cells or B cells). In some embodiments, guide RNAs are provided which produce indels at less than 5 off-target sites, e.g., as evaluated by one or more methods described herein. In some embodiments, guide RNAs are provided which produce indels at less than or equal to 4, 3, 2, or 1 off-target site(s) e.g., as evaluated by one or more methods described herein. In some embodiments, the off-target site(s) does not occur in a protein coding region in the target cell (e.g., T cells or B cells) genome.

[0944] In some embodiments, linear amplification is used to detect gene editing events, such as the formation of insertion/deletion (“indel”) mutations, translocations, and homology directed repair (HDR) events in target DNA. For example, linear amplification with a unique sequence-tagged primer and isolating the tagged amplification products (herein after referred to as “UnIT,” or “Unique Identifier Tagmentation” method) may be used.

[0945] In some embodiments, the efficacy of a guide RNA is measured by the number of chromosomal rearrangements within the target cell type. Kromatid dGH assay may used to detect chromosomal rearrangements, including e.g., translocations, reciprocal translocations, translocations to off-target chromosomes, deletions (i.e., chromosomal rearrangements where fragments were lost during the cell replication cycle due to the editing event). In some embodiments, the target cell type has less than 10, less than 8, less than 5, less than 4, less than 3, less than 2, or less than 1 chromosomal rearrangement. In some embodiments, the target cell type has no chromosomal rearrangements.

### K. Delivery of gRNA Compositions

[0946] Lipid nanoparticles (LNP compositions) are a well-known means for delivery of nucleotide and protein cargo and may be used for delivery of the guide RNAs, compositions, or pharmaceutical formulations disclosed herein. In some embodiments, the LNP compositions deliver nucleic acid, protein, or nucleic acid together with protein.

[0947] In some embodiments, the invention comprises a method for delivering any one of the gRNAs disclosed herein to a subject, wherein the gRNA is formulated as an LNP. In some embodiments, the LNP comprises the gRNA and a Cas9 or an mRNA encoding Cas9.

[0948] In some embodiments, the invention comprises a composition comprising any one of the gRNAs disclosed and an LNP. In some embodiments, the composition further comprises a Cas9 or an mRNA encoding Cas9.

[0949] In some embodiments, the LNP compositions comprise cationic lipids. In some embodiments, the LNP compositions comprise (9Z,12Z)-3-((4,4-bis(octyloxy)butanoyl)oxy)-2-((((3-(diethylamino)propoxy)carbonyl)oxy)methyl)propyl octadeca-9,12-dienoate, also called 3-((4,4-bis(octyloxy)butanoyl)oxy)-2-((((3-(diethylamino)propoxy)carbonyl)oxy)methyl)propyl (9Z,12Z)-octadeca-9,12-dienoate) (Lipid A) or another ionizable lipid. See, e.g., lipids of WO/2017/173054 and references described therein. In some embodiments, the LNP compositions comprise molar ratios of a cationic lipid amine to RNA phosphate (N:P) of about 4.5, 5.0, 5.5, 6.0, or 6.5. In some embodiments, the term cationic and ionizable in the context of LNP lipids is interchangeable, e.g., wherein ionizable lipids are cationic depending on the pH.

[0950] In some embodiments, the LNP comprises a lipid component, and the lipid component comprises: about 35 mol % Lipid A; about 15 mol % neutral lipid (e.g., distearoylphosphatidylcholine (DSPC)); about 47.5 mol % helper lipid (e.g., cholesterol); and about 2.5 mol % stealth lipid (e.g., 1,2-dimyristoyl-rac-gly cero-3-methylpolyoxyethylene glycol 2000 (PEG2k-DMG)), and wherein the N/P ratio of the LNP composition is about 3-7.

[0951] In some embodiments, the gRNAs disclosed herein are formulated as LNP compositions for use in preparing a medicament for treating a disease or disorder.

[0952] Electroporation is a well-known means for delivery of cargo, and any electroporation methodology may be used for delivery of any one of the gRNAs disclosed herein. In some embodiments, electroporation may be used to deliver any one of the gRNAs disclosed herein and Cas9 or an mRNA encoding Cas9.

[0953] In some embodiments, the invention comprises a method for delivering any one of the gRNAs disclosed herein to an ex vivo cell, wherein the gRNA is formulated as an LNP or not formulated as an LNP. In some embodiments, the LNP comprises the gRNA and a Cas9 or an mRNA encoding Cas9.

[0954] In some embodiments, the guide RNA compositions described herein, alone or encoded on one or more vectors, are formulated in or administered via a lipid nanoparticle; see e.g., WO/2017/173054 and WO 2019/067992, the contents of which are hereby incorporated by reference in their entirety.

[0955] In certain embodiments, the invention comprises DNA or RNA vectors encoding any of the guide RNAs comprising any one or more of the guide sequences described herein. In some embodiments, in addition to guide RNA sequences, the vectors further comprise nucleic acids that do not encode guide RNAs. Nucleic acids that do not encode guide RNA include, but are not limited to, promoters, enhancers, regulatory sequences, and nucleic acids encoding an RNA-guided DNA nuclease, which can be a nuclease such as Cas9. In some embodiments, the vector comprises one or more nucleotide sequence(s) encoding a crRNA, a trRNA, or a crRNA and trRNA. In some embodiments, the vector comprises one or more nucleotide sequence(s) encoding a sgRNA and an mRNA encoding an RNA-guided DNA nuclease, which can be a Cas nuclease, such as Cas9 or Cpf1. In some embodiments, the vector comprises one or more nucleotide sequence(s) encoding a crRNA, a trRNA, and an mRNA encoding an RNA-guided DNA nuclease, which can be a Cas protein, such as, Cas9. In one embodiment, the Cas9 is from S. pyogenes (i.e., Spy Cas9). In one embodiment, the Cas9 nuclease is from N. meningitidis (i.e., Nine Cas9). In some embodiments, the nucleotide sequence encoding the crRNA, trRNA, or crRNA and trRNA (which may be a sgRNA) comprises or consists of a guide sequence flanked by all or a portion of a repeat sequence from a naturally-occurring CRISPR/Cas system. The nucleic acid comprising or consisting of the crRNA, trRNA, or crRNA and trRNA may further comprise a vector sequence wherein the vector sequence comprises or consists of nucleic acids that are not naturally found together with the crRNA, trRNA, or crRNA and trRNA.

### L. Therapeutic Methods and Uses

[0956] Any of the engineered human cells and compositions described herein can be used in a method of treating a variety of diseases and disorders, as described herein. In some embodiments, the genetically modified cell (engineered cell) or population of genetically modified cells (engineered cells) and compositions may be used in methods of treating a variety of diseases and disorders. In some embodiments, a method of treating any one of the diseases or disorders described herein is encompassed, comprising administering any one or more composition described herein.

[0957] In some embodiments, the methods and compositions described herein may be used to treat diseases or disorders in need of delivery of a therapeutic agent. In some embodiments, the invention provides a method of providing an immunotherapy in a subject, the method including administering to the subject an effective amount of an engineered cell (or population of engineered cells) as described herein, for example, a cell of any of the aforementioned cell aspects and embodiments.

[0958] In some embodiments, the methods comprise administering to a subject a composition comprising an engineered cell described herein as an adoptive cell transfer therapy. In some embodiments, the engineered cell is an allogeneic cell.

[0959] In some embodiments, the methods comprise administering to a subject a composition comprising an engineered cell described herein, wherein the cell produces, secretes, or expresses a polypeptide (e.g., a targeting receptor) useful for treatment of a disease or disorder in a subject. In some embodiments, the cell acts as a cell factory to produce a soluble polypeptide. In some embodiments, the cell acts as a cell factory to produce an antibody. In some embodiments, the cell continuously secretes the polypeptide in vivo. In some embodiments, the cell continuously secretes the polypeptide following transplantation in vivo for at least 1, 2, 3, 4, 5, or 6 weeks. In some embodiments, the cell continuously secretes the polypeptide following transplantation in vivo for more than 6 weeks. In some embodiments, the soluble polypeptide (e.g., an antibody) is produced by the cell at a concentration of at least 10², 10³, 104, 105, 10⁶, 107, or 10⁸ copies per day. In some embodiments, the polypeptide is an antibody and is produced by the cell at a concentration of at least 10⁸ copies per day.

[0960] In some embodiments of the methods, the method includes administering a lymphodepleting agent or immunosuppressant prior to administering to the subject an effective amount of the engineered cell (or engineered cells) as described herein, for example, a cell of any of the aforementioned cell aspects and embodiments. In another aspect, the invention provides a method of preparing engineered cells (e.g., a population of engineered cells).

[0961] Immunotherapy is the treatment of disease by activating or suppressing the immune system. Immunotherapies designed to elicit or amplify an immune response are classified as activation immunotherapies. Cell-based immunotherapies have been demonstrated to be effective in the treatment of some cancers. Immune effector cells such as lymphocytes, macrophages, dendritic cells, natural killer (NK) cells, cytotoxic T lymphocytes (CTLs), T helper cells, B cells, or their progenitors such as hematopoietic stem cells (HSC) or induced pluripotent stem cells (iPSC) can be programmed to act in response to abnormal antigens expressed on the surface of tumor cells. Thus, cancer immunotherapy allows components of the immune system to destroy tumors or other cancerous cells. Cell-based immunotherapies have also been demonstrated to be effective in the treatment of autoimmune diseases or transplant rejection. Immune effector cells such as regulatory T cells (Tregs) or mesenchymal stem cells can be programmed to act in response to autoantigens or transplant antigens expressed on the surface of normal tissues.

[0962] In some embodiments, the invention provides a method of preparing engineered cells (e.g., a population of engineered cells). The population of engineered cells may be used for immunotherapy.

[0963] In some embodiments, the invention provides a method of treating a subject in need thereof that includes administering engineered cells prepared by a method of preparing cells described herein, for example, a method of any of the aforementioned aspects and embodiments of methods of preparing cells.

[0964] In some embodiments, the engineered cells can be used to treat cancer, infectious diseases, inflammatory diseases, autoimmune diseases, cardiovascular diseases, neurological diseases, ophthalmologic diseases, renal diseases, liver diseases, musculoskeletal diseases, red blood cell diseases, or transplant rejections. In some embodiments, the engineered cells can be used in cell transplant, e.g., to the heart, liver, lung, kidney, pancreas, skin, or brain. (See e.g., Deuse et al., Nature Biotechnology 37:252-258 (2019).)

[0965] In some embodiments, the engineered cells can be used as a cell therapy comprising an allogeneic stem cell therapy. In some embodiments, the cell therapy comprises induced pluripotent stem cells (iPSCs). iPSCs may be induced to differentiate into other cell types including e.g., cardiomyocytes, beta islet cells, neurons, and blood cells. In some embodiments, the cell therapy comprises hematopoietic stem cells. In some embodiments, the stem cells comprise mesenchymal stem cells that can develop into bone, cartilage, muscle, and fat cells. In some embodiments, the stem cells comprise ocular stem cells. In some embodiments, the allogeneic stem cell transplant comprises allogeneic bone marrow transplant. In some embodiments, the stem cells comprise pluripotent stem cells (PSCs). In some embodiments, the stem cells comprise induced embryonic stem cells (ESCs).

[0966] The engineered human cells disclosed herein are suitable for further engineering, e.g., by introduction of further edited, or modified genes or alleles. Cells of the invention may also be suitable for further engineering by introduction of an exogenous nucleic acid encoding e.g., a targeting receptor, e.g., a TCR, CAR, UniCAR. CARs are also known as chimeric immunoreceptors, chimeric T cell receptors or artificial T cell receptors. In some embodiments, the TCR is a wild-type or variant TCR.

[0967] In some embodiments, the cell therapy is a transgenic T cell therapy. In some embodiments, the cell therapy comprises a Wilms' Tumor 1 (WT1) targeting transgenic T cell. In some embodiments, the cell therapy comprises a targeting receptor or a donor nucleic acid encoding a targeting receptor of a commercially available T cell therapy, such as a CAR T cell therapy. There are number of targeting receptors currently approved for cell therapy. The cells and methods provided herein can be used with these known constructs. Commercially approved cell products that include targeting receptor constructs for use as cell therapies include e.g., Kymriah® (tisagenlecleucel); Yescarta® (axicabtagene ciloleucel); Tecartus™ (brexucabtagene autoleucel); Tabelecleucel (Tab-cel®); Viralym-M (ALVR105); and Viralym-C.

[0968] In some embodiments, the methods provide for administering the engineered cells to a subject, wherein the administration is an injection. In some embodiments, the methods provide for administering the engineered cells to a subject, wherein the administration is an intravascular injection or infusion. In some embodiments, the methods provide for administering the engineered cells to a subject, wherein the administration is a single dose.

[0969] In some embodiments, the methods provide for reducing a sign or symptom associated of a subject's disease treated with a composition disclosed herein. In some embodiments, the subject has a response to treatment with a composition disclosed herein that lasts more than one week. In some embodiments, the subject has a response to treatment with a composition disclosed herein that lasts more than two weeks. In some embodiments, the subject has a response to treatment with a composition disclosed herein that lasts more than three weeks. In some embodiments, the subject has a response to treatment with a composition disclosed herein that lasts more than one month.

[0970] In some embodiments, the methods provide for administering the engineered cells to a subject, and wherein the subject has a response to the administered cell that comprises a reduction in a sign or symptom associated with the disease treated by the cell therapy. In some embodiments, the subject has a response that lasts more than one week. In some embodiments, the subject has a response that lasts more than one month. In some embodiments, the subject has a response that lasts for at least 1-6 weeks.

TABLE 9
VI. ADDITIONAL SEQUENCES
*The guide sequence disclosed in this Table may be unmodified, modified with the exemplary modification pattern shown in the Table, or
modified with a different modification pattern disclosed herein or available in the art.

| | SEQ ID | |
|---|---|---|
| Description | NO | Sequence |
| Exemplary SpyCas9 | 600 | GUUUUAGAGCUAGAAAUAGCAAGUUAAAAUAAGGCUAGUCCGUUAUCAACUUGAAAAAGUGGCACCGAGUCGGUGC |
| sgRNA scaffold | | |
| Exemplary SpyCas 9 | 601 | GUUUUAGAGCUAUGCUGUUUUG |
| crRNA 3′ Sequence | | |
| Exemplary SpyCas 9 | 602 | GUUUUAGAGCUAGAAAUAGCAAGUUAAAAUAAGGCUAGUCCGUUAUCAACUUGAAAAAGUGGCACCGAGUCGGUGCUUUU |
| sgRNA Scaffold | | |
| Exemplary SpyCas9 | 603 | GUUUUAGAGCUAGAAAUAGCAAGUUAAAAUAAGGCUAGUCCGUUAUCAACUUGAAAAAGUGGCACCGAGUCGGUGC |
| sgRNA Scaffold | | |
| Exemplary SpyCas9 | 604 | GUUUUAGAGCUAGAAAUAGCAAGUUAAAAUAAGGCUAGUCCGUUAUCAACUUGGCACCGAGUCGGUGC |
| crRNA Scaffold | | |
| | 605-612 | See Table 9A |
| | 613-698 | Not used |
| Exemplary NmeCas9 | 699 | GUUGUAGCUCCCUUUCUCAUUUCGGAAACGAAAUGAGAACCGUUGCUACAAUAAGGCCGUCUGAAAAGAUGUGCCGCAACGCUCU |
| guide RNA scaffold | | GCCCCUUAAAGCUUCUGCUUUAAGGGGCAUCGUUUA |
| Exemplary NmeCas 9 | 700 | (N)₂₀₋₂₅ |
| guide RNA | | GUUGUAGCUCCCUUUCUCAUUUCGGAAACGAAAUGAGAACCGUUGCUACAAUAAGGCCGUCUGAAAAGAUGUGCCGCAACGCUCU |
| | | GCCCCUUAAAGCUUCUGCUUUAAGGGGCAUCGUUUA |
| Shortened/unmodified | 3119 | (N)₂₀₋₂₅GUUGUAGCUCCCUGAAACCGUUGCUACAAUAAGGCCGUCGAAAGAUGUGCCGCAACGCUCUGCCUUCUGGCAUCGUU |
| NmeCas9 guide RNA | | |
| motif | | |
| Shortened/unmodified | 3120 | (N)₂₀₋₂₅ |
| NmeCas9 guide RNA | | GUUGUAGCUCCCUGAAACCGUUGCUACAAUAAGGCCGUCGAAAGAUGUGCCGCAACGCUCUGCCUUCUGGCAUCGUUUAUU |
| motif | | |
| Shortened/unmodified | 3121 | (N)₂₀₋₂₅ |
| NmeCas9 guide RNA | | GUUGUAGCUCCCUGGAAACCCGUUGCUACAAUAAGGCCGUCGAAAGAUGUGCCGCAACGCUCUGCCUUCUGGCAUCGUUUAUU |
| motif | | |
| Shortened/unmodified | 704 | (N)₂₀₋₂₅ |
| NmeCas9 guide RNA | | GUUGUAGCUCCCUUCGAAAGACCGUUGCUACAAUAAGGCCGUCGAAAGAUGUGCCGCAACGCUCUGCCUUCUGGCAUCGUU |
| motif | | |
| Shortened/modified | 705 | mN*mNNNNNNNNmNNNmNNNNNNNNNNNNmGUUGmUmAmGmCUCCCmUmGmAmAmAmCmCGUUmGmCUAmCAAU*AAGmGmCCmG |
| NmeCas9 guide RNA | | mUmCmGmAmAmAmGmAmUGUGCmCGCmAmAmCmGCUCUmGmCCmUmUmCmUGmGCmAmUC*mG*mU*mU |
| motif (101-mer) | | |
| Shortened/modified | 706 | (N)₂₀₋₂₅GUUGmUmAmGmCUCCCmUmGmAmAmAmCmCGUUmGmCUAmCAAU*AAGmGmCCmGmUmCmGm |
| NmeCas9 guide RNA | | AmAmAmGmAmUGUGCmCGCmAmAmCmGCUCUmGmCCmUmUmCmUGmGCmAmUC*mG*mU*mU |
| motif | | |
| Shortened/modified | 707 | GUUGmUmAmGmCUCCCmUmGmAmAmAmCmCGUUmGmCUAmCAAU*AAGmGmCCmGmUmCmGmAmAmAmGmAmUGUGCmCGCmAmA |
| NmeCas9 guide RNA | | mCmGCUCUmGmCCmUmUmCmUGmGCmAmUC*mG*mU*mU |
| motif | | |
| Shortened/modified | 708 | mN*mN*mN*mNmNNNmNmNNmNNmNNNNNmNNNNmNNNmGUUGmUmAmGmCUCCCmUmGmAmAmAmCmCGUUmGmCUAmCAAU*A |
| NmeCas9 guide RNA | | AGmGmCCmGmUmCmGmAmAmAmGmAmUGUGCmCGmCAAmCGCUCUmGmCCmUmUmCmUGGCAUCG*mU*mU |
| motif (101-mer) | | |
| Shortened/modified | 709 | (N)₂₀₋₂₅GUUGmUmAmGmCUCCCmUmGmAmAmAmCmCGUUmGmCUAmCAAU*AAGmGmCCmGmUmCmGm |
| NmeCas9 guide RNA | | AmAmAmGmAmUGUGCmCGmCAAmCGCUCUmGmCCmUmUmCmUGGCAUCG*mU*mU |
| motif | | |
| Shortened/modified | 710 | GUUGmUmAmGmCUCCCmUmGmAmAmAmCmCGUUmGmCUAmCAAU*AAGmGmCCmGmUmCmGmAmAmAmGmAmUGUGCmCGmCAAm |
| NmeCas9 guide RNA | | CGCUCUmGmCCmUmUmCmUGGCAUCG*mU*mU |
| motif | | |
| Shortened/modified | 711 | mN*mN*mN*mNmNNNmNmNNmNNmNNNNNmNNNNmNNNmGUUGmUmAmGmCUCCCmUmUmCmGmAmAmAmGmAmCmCGUUmGmCU |
| NmeCas9 guide RNA | | AmCAAU*AAGmGmCCmGmUmCmGmAmAmAmGmAmUGUGCmCGmCAAmCGCUCUmGmCCmUmUmCmUGGCAUCG*mU*mU |
| motif (105-mer) | | |
| Shortened/modified | 712 | mN*mN*mN*mNmNNNmNmNNmNNmNNNNNmNNNNmNNNmGUUGmUmAmGmCUCCCmUmGmAmAmAmCmCGUUmGmCUAmCAAUAA |
| NmeCas9 guide RNA | | GmGmCCmGmUmCmGmAmAmAmGmAmUGUGCmCGmCAAmCGCUCUmGmCCmUmUmCmUGGCAUCG*mU*mU |
| motif (101-mer) | | |
| Shortened/modified | 713 | mN*mN*mN*mNmNNNmNmNNmNNmNNNNNmNNNNmNNNmGUUGmUmAmGmCUCCCmUmGmAmAmAmCmCGUUmGmCUAmCAAU*A |
| NmeCas9 guide RNA | | AGmGmCCmGmUmCmGmAmAmAmGmAmUGUGCmCGmCAAmCGmCmUmCmUmGmCCmUmUmCmUGGCAUCG*mU*mU |
| motif (101-mer) | | |
| Shortened/modified | 714 | mN*mN*mN*mNmNNNmNmNNmNNmNNNNNmNNNNmNNNmGUUGmUmAmGmCUCCCmUmGmAmAmAmCmCGUUmGmCUAmCAAUAA |
| NmeCas9 guide RNA | | GmGmCCmGmUmCmGmAmAmAmGmAmUGUGCmCGmCAAmCGmCmUmCmUmGmCCmUmUmCmUGGCAUCG*mU*mU |
| motif (101-mer) | | |
| Guide scaffold | 715 | mGUUGmUmAmGmCUCCCmUmGmAmAmAmCmCGUUmGmCUAmCAAU*AAGmGmCCmGmUmCmGmAmAmAmGmAmUGUGCmCGCmAm |
| | | AmCmGCUCUmGmCCmUmUmCmUGmGCmAmUC*mG*mU*mU |
| Guide scaffold | 716 | mGUUGmUmAmGmCUCCCmUmGmAmAmAmCmCGUUmGmCUAmCAAU*AAGmGmCCmGmUmCmGmAmAmAmGmAmUGUGCmCGmCAA |
| | | mCGCUCUmGmCCmUmUmCmUGGCAUCG*mU*mU |
| Guide scaffold | 717 | mGUUGmUmAmGmCUCCCmUmGmAmAmAmCmCGUUmGmCUAmCAAUAAGmGmCCmGmUmCmGmAmAmAmGmAmUGUGCmCGmCAAm |
| | | CGCUCUmGmCCmUmUmCmUGGCAUCG*mU*mU |
| Guide scaffold | 718 | mGUUGmUmAmGmCUCCCmUmGmAmAmAmCmCGUUmGmCUAmCAAU*AAGmGmCCmGmUmCmGmAmAmAmGmAmUGUGCmCGmCAA |
| | | mCGmCmUmCmUmGmCCmUmUmCmUGGCAUCG*mU*mU |
| Guide scaffold | 719 | mGUUGmUmAmGmCUCCCmUmGmAmAmAmCmCGUUmGmCUAmCAAUAAGmGmCCmGmUmCmGmAmAmAmGmAmUGUGCmCGmCAAm |
| | | CGmCmUmCmUmGmCCmUmUmCmUGGCAUCG*mU*mU |
| Guide scaffold | 720 | mGUUGmUmAmGmCUCCCmUmUmCmGmAmAmAmGmAmCmCGUUmGmCUAmCAAU*AAGmGmCCmGmUmCmGmAmAmAmGmAmUGUG |
| | | CmCGmCAAmCGCUCUmGmCCmUmUmCmUGGCAUCG*mU*mU |
| Guide scaffold | 721 | mGUUGmUmAmGmCUCCCmUmUmCmGmAmAmAmGmAmCmCGUUmGmCUAmCAAUAAGmGmCCmGmUmCmGmAmAmAmGmAmUGUGC |
| | | mCGmCAAmCGCUCUmGmCCmUmUmCmUGGCAUCG*mU*mU |
| Guide scaffold | 722 | mGUUGmUmAmGmCUCCCmUmUmCmGmAmAmAmGmAmCmCGUUmGmCUAmCAAU*AAGmGmCCmGmUmCmGmAmAmAmGmAmUGUG |
| | | CmCGmCAAmCGmCmUmCmUmGmCCmUmUmCmUGGCAUCG*mU*mU |
| Guide scaffold | 723 | mGUUGmUmAmGmCUCCCmUmUmCmGmAmAmAmGmAmCmCGUUmGmCUAmCAAUAAGmGmCCmGmUmCmGmAmAmAmGmAmUGUGC |
| | | mCGmCAAmCGmCmUmCmUmGmCCmUmUmCmUGGCAUCG*mU*mU |
| | 724-799 | Not used |
| Recombinant Cas9-NLS | 800 | MDKKYSIGLDIGTNSVGWAVITDEYKVPSKKFKVLGNTDRHSIKKNLIGALLFDSGETAEATRLKRTARRRYTRRKNRICYLQEI |
| amino acid sequence | | FSNEMAKVDDSFFHRLEESFLVEEDKKHERHPIFGNIVDEVAYHEKYPTIYHLRKKLVDSTDKADLRLIYLALAHMIKFRGHFLI |
| | | EGDLNPDNSDVDKLFIQLVQTYNQLFEENPINASGVDAKAILSARLSKSRRLENLIAQLPGEKKNGLFGNLIALSLGLTPNFKSN |
| | | FDLAEDAKLQLSKDTYDDDLDNLLAQIGDQYADLFLAAKNLSDAILLSDILRVNTEITKAPLSASMIKRYDEHHQDLTLLKALVR |
| | | QQLPEKYKEIFFDQSKNGYAGYIDGGASQEEFYKFIKPILEKMDGTEELLVKLNREDLLRKQRTFDNGSIPHQIHLGELHAILRR |
| | | QEDFYPFLKDNREKIEKILTFRIPYYVGPLARGNSRFAWMTRKSEETITPWNFEEVVDKGASAQSFIERMTNFDKNLPNEKVLPK |
| | | HSLLYEYFTVYNELTKVKYVTEGMRKPAFLSGEQKKAIVDLLFKTNRKVTVKQLKEDYFKKIECFDSVEISGVEDRFNASLGTYH |
| | | DLLKIIKDKDFLDNEENEDILEDIVLTLTLFEDREMIEERLKTYAHLEDDKVMKQLKRRRYTGWGRLSRKLINGIRDKQSGKTIL |
| | | DFLKSDGFANRNFMQLIHDDSLTFKEDIQKAQVSGQGDSLHEHIANLAGSPAIKKGILQTVKVVDELVKVMGRHKPENIVIEMAR |
| | | ENQTTQKGQKNSRERMKRIEEGIKELGSQILKEHPVENTQLQNEKLYLYYLQNGRDMYVDQELDINRLSDYDVDHIVPQSELKDD |
| | | SIDNKVLTRSDKNRGKSDNVPSEEVVKKMKNYWRQLLNAKLITQRKFDNLTKAERGGLSELDKAGFIKRQLVETRQITKHVAQIL |
| | | DSRMNTKYDENDKLIREVKVITLKSKLVSDFRKDFQFYKVREINNYHHAHDAYLNAVVGTALIKKYPKLESEFVYGDYKVYDVRK |
| | | MIAKSEQEIGKATAKYFFYSNIMNFFKTEITLANGEIRKRPLIETNGETGEIVWDKGRDFATVRKVLSMPQVNIVKKTEVQTGGF |
| | | SKESILPKRNSDKLIARKKDWDPKKYGGFDSPTVAYSVLVVAKVEKGKSKKLKSVKELLGITIMERSSFEKNPIDFLEAKGYKEV |
| | | KKDLIIKLPKYSLFELENGRKRMLASAGELQKGNELALPSKYVNFLYLASHYEKLKGSPEDNEQKQLFVEQHKHYLDEIIEQISE |
| | | FSKRVILADANLDKVLSAYNKHRDKPIREQAENIIHLFTLTNLGAPAAFKYFDTTIDRKRYTSTKEVLDATLIHQSITGLYETRI |
| | | DLSQLGGDGGGSPKKKRKV |
| ORF encoding Spy Cas9 | 801 | ATGGACAAGAAGTACAGCATCGGACTGGACATCGGAACAAACAGCGTCGGATGGGCAGTCATCACAGACGAATACAAGGTCCCGA |
| | | GCAAGAAGTTCAAGGTCCTGGGAAACACAGACAGACACAGCATCAAGAAGAACCTGATCGGAGCACTGCTGTTCGACAGCGGAGA |
| | | AACAGCAGAAGCAACAAGACTGAAGAGAACAGCAAGAAGAAGATACACAAGAAGAAAGAACAGAATCTGCTACCTGCAGGAAATC |
| | | TTCAGCAACGAAATGGCAAAGGTCGACGACAGCTTCTTCCACAGACTGGAAGAAAGCTTCCTGGTCGAAGAAGACAAGAAGCACG |
| | | AAAGACACCCGATCTTCGGAAACATCGTCGACGAAGTCGCATACCACGAAAAGTACCCGACAATCTACCACCTGAGAAAGAAGCT |
| | | GGTCGACAGCACAGACAAGGCAGACCTGAGACTGATCTACCTGGCACTGGCACACATGATCAAGTTCAGAGGACACTTCCTGATC |
| | | GAAGGAGACCTGAACCCGGACAACAGCGACGTCGACAAGCTGTTCATCCAGCTGGTCCAGACATACAACCAGCTGTTCGAAGAAA |
| | | ACCCGATCAACGCAAGCGGAGTCGACGCAAAGGCAATCCTGAGCGCAAGACTGAGCAAGAGCAGAAGACTGGAAAACCTGATCGC |
| | | ACAGCTGCCGGGAGAAAAGAAGAACGGACTGTTCGGAAACCTGATCGCACTGAGCCTGGGACTGACACCGAACTTCAAGAGCAAC |
| | | TTCGACCTGGCAGAAGACGCAAAGCTGCAGCTGAGCAAGGACACATACGACGACGACCTGGACAACCTGCTGGCACAGATCGGAG |
| | | ACCAGTACGCAGACCTGTTCCTGGCAGCAAAGAACCTGAGCGACGCAATCCTGCTGAGCGACATCCTGAGAGTCAACACAGAAAT |
| | | CACAAAGGCACCGCTGAGCGCAAGCATGATCAAGAGATACGACGAACACCACCAGGACCTGACACTGCTGAAGGCACTGGTCAGA |
| | | CAGCAGCTGCCGGAAAAGTACAAGGAAATCTTCTTCGACCAGAGCAAGAACGGATACGCAGGATACATCGACGGAGGAGCAAGCC |
| | | AGGAAGAATTCTACAAGTTCATCAAGCCGATCCTGGAAAAGATGGACGGAACAGAAGAACTGCTGGTCAAGCTGAACAGAGAAGA |
| | | CCTGCTGAGAAAGCAGAGAACATTCGACAACGGAAGCATCCCGCACCAGATCCACCTGGGAGAACTGCACGCAATCCTGAGAAGA |
| | | CAGGAAGACTTCTACCCGTTCCTGAAGGACAACAGAGAAAAGATCGAAAAGATCCTGACATTCAGAATCCCGTACTACGTCGGAC |
| | | CGCTGGCAAGAGGAAACAGCAGATTCGCATGGATGACAAGAAAGAGCGAAGAAACAATCACACCGTGGAACTTCGAAGAAGTCGT |
| | | CGACAAGGGAGCAAGCGCACAGAGCTTCATCGAAAGAATGACAAACTTCGACAAGAACCTGCCGAACGAAAAGGTCCTGCCGAAG |
| | | CACAGCCTGCTGTACGAATACTTCACAGTCTACAACGAACTGACAAAGGTCAAGTACGTCACAGAAGGAATGAGAAAGCCGGCAT |
| | | TCCTGAGCGGAGAACAGAAGAAGGCAATCGTCGACCTGCTGTTCAAGACAAACAGAAAGGTCACAGTCAAGCAGCTGAAGGAAGA |
| | | CTACTTCAAGAAGATCGAATGCTTCGACAGCGTCGAAATCAGCGGAGTCGAAGACAGATTCAACGCAAGCCTGGGAACATACCAC |
| | | GACCTGCTGAAGATCATCAAGGACAAGGACTTCCTGGACAACGAAGAAAACGAAGACATCCTGGAAGACATCGTCCTGACACTGA |
| | | CACTGTTCGAAGACAGAGAAATGATCGAAGAAAGACTGAAGACATACGCACACCTGTTCGACGACAAGGTCATGAAGCAGCTGAA |
| | | GAGAAGAAGATACACAGGATGGGGAAGACTGAGCAGAAAGCTGATCAACGGAATCAGAGACAAGCAGAGCGGAAAGACAATCCTG |
| | | GACTTCCTGAAGAGCGACGGATTCGCAAACAGAAACTTCATGCAGCTGATCCACGACGACAGCCTGACATTCAAGGAAGACATCC |
| | | AGAAGGCACAGGTCAGCGGACAGGGAGACAGCCTGCACGAACACATCGCAAACCTGGCAGGAAGCCCGGCAATCAAGAAGGGAAT |
| | | CCTGCAGACAGTCAAGGTCGTCGACGAACTGGTCAAGGTCATGGGAAGACACAAGCCGGAAAACATCGTCATCGAAATGGCAAGA |
| | | GAAAACCAGACAACACAGAAGGGACAGAAGAACAGCAGAGAAAGAATGAAGAGAATCGAAGAAGGAATCAAGGAACTGGGAAGCC |
| | | AGATCCTGAAGGAACACCCGGTCGAAAACACACAGCTGCAGAACGAAAAGCTGTACCTGTACTACCTGCAGAACGGAAGAGACAT |
| | | GTACGTCGACCAGGAACTGGACATCAACAGACTGAGCGACTACGACGTCGACCACATCGTCCCGCAGAGCTTCCTGAAGGACGAC |
| | | AGCATCGACAACAAGGTCCTGACAAGAAGCGACAAGAACAGAGGAAAGAGCGACAACGTCCCGAGCGAAGAAGTCGTCAAGAAGA |
| | | TGAAGAACTACTGGAGACAGCTGCTGAACGCAAAGCTGATCACACAGAGAAAGTTCGACAACCTGACAAAGGCAGAGAGAGGAGG |
| | | ACTGAGCGAACTGGACAAGGCAGGATTCATCAAGAGACAGCTGGTCGAAACAAGACAGATCACAAAGCACGTCGCACAGATCCTG |
| | | GACAGCAGAATGAACACAAAGTACGACGAAAACGACAAGCTGATCAGAGAAGTCAAGGTCATCACACTGAAGAGCAAGCTGGTCA |
| | | GCGACTTCAGAAAGGACTTCCAGTTCTACAAGGTCAGAGAAATCAACAACTACCACCACGCACACGACGCATACCTGAACGCAGT |
| | | CGTCGGAACAGCACTGATCAAGAAGTACCCGAAGCTGGAAAGCGAATTCGTCTACGGAGACTACAAGGTCTACGACGTCAGAAAG |
| | | ATGATCGCAAAGAGCGAACAGGAAATCGGAAAGGCAACAGCAAAGTACTTCTTCTACAGCAACATCATGAACTTCTTCAAGACAG |
| | | AAATCACACTGGCAAACGGAGAAATCAGAAAGAGACCGCTGATCGAAACAAACGGAGAAACAGGAGAAATCGTCTGGGACAAGGG |
| | | AAGAGACTTCGCAACAGTCAGAAAGGTCCTGAGCATGCCGCAGGTCAACATCGTCAAGAAGACAGAAGTCCAGACAGGAGGATTC |
| | | AGCAAGGAAAGCATCCTGCCGAAGAGAAACAGCGACAAGCTGATCGCAAGAAAGAAGGACTGGGACCCGAAGAAGTACGGAGGAT |
| | | TCGACAGCCCGACAGTCGCATACAGCGTCCTGGTCGTCGCAAAGGTCGAAAAGGGAAAGAGCAAGAAGCTGAAGAGCGTCAAGGA |
| | | ACTGCTGGGAATCACAATCATGGAAAGAAGCAGCTTCGAAAAGAACCCGATCGACTTCCTGGAAGCAAAGGGATACAAGGAAGTC |
| | | AAGAAGGACCTGATCATCAAGCTGCCGAAGTACAGCCTGTTCGAACTGGAAAACGGAAGAAAGAGAATGCTGGCAAGCGCAGGAG |
| | | AACTGCAGAAGGGAAACGAACTGGCACTGCCGAGCAAGTACGTCAACTTCCTGTACCTGGCAAGCCACTACGAAAAGCTGAAGGG |
| | | AAGCCCGGAAGACAACGAACAGAAGCAGCTGTTCGTCGAACAGCACAAGCACTACCTGGACGAAATCATCGAACAGATCAGCGAA |
| | | TTCAGCAAGAGAGTCATCCTGGCAGACGCAAACCTGGACAAGGTCCTGAGCGCATACAACAAGCACAGAGACAAGCCGATCAGAG |
| | | AACAGGCAGAAAACATCATCCACCTGTTCACACTGACAAACCTGGGAGCACCGGCAGCATTCAAGTACTTCGACACAACAATCGA |
| | | CAGAAAGAGATACACAAGCACAAAGGAAGTCCTGGACGCAACACTGATCCACCAGAGCATCACAGGACTGTACGAAACAAGAATC |
| | | GACCTGAGCCAGCTGGGAGGAGACGGAGGAGGAAGCCCGAAGAAGAAGAGAAAGGTCTAG |
| ORF encoding Spy Cas9 | 802 | ATGGACAAGAAGTACTCCATCGGCCTGGACATCGGCACCAACTCCGTGGGCTGGGCCGTGATCACCGACGAGTACAAGGTGCCCT |
| | | CCAAGAAGTTCAAGGTGCTGGGCAACACCGACCGGCACTCCATCAAGAAGAACCTGATCGGCGCCCTGCTGTTCGACTCCGGCGA |
| | | GACCGCCGAGGCCACCCGGCTGAAGCGGACCGCCCGGCGGCGGTACACCCGGCGGAAGAACCGGATCTGCTACCTGCAGGAGATC |
| | | TTCTCCAACGAGATGGCCAAGGTGGACGACTCCTTCTTCCACCGGCTGGAGGAGTCCTTCCTGGTGGAGGAGGACAAGAAGCACG |
| | | AGCGGCACCCCATCTTCGGCAACATCGTGGACGAGGTGGCCTACCACGAGAAGTACCCCACCATCTACCACCTGCGGAAGAAGCT |
| | | GGTGGACTCCACCGACAAGGCCGACCTGCGGCTGATCTACCTGGCCCTGGCCCACATGATCAAGTTCCGGGGCCACTTCCTGATC |
| | | GAGGGCGACCTGAACCCCGACAACTCCGACGTGGACAAGCTGTTCATCCAGCTGGTGCAGACCTACAACCAGCTGTTCGAGGAGA |
| | | ACCCCATCAACGCCTCCGGCGTGGACGCCAAGGCCATCCTGTCCGCCCGGCTGTCCAAGTCCCGGCGGCTGGAGAACCTGATCGC |
| | | CCAGCTGCCCGGCGAGAAGAAGAACGGCCTGTTCGGCAACCTGATCGCCCTGTCCCTGGGCCTGACCCCCAACTTCAAGTCCAAC |
| | | TTCGACCTGGCCGAGGACGCCAAGCTGCAGCTGTCCAAGGACACCTACGACGACGACCTGGACAACCTGCTGGCCCAGATCGGCG |
| | | ACCAGTACGCCGACCTGTTCCTGGCCGCCAAGAACCTGTCCGACGCCATCCTGCTGTCCGACATCCTGCGGGTGAACACCGAGAT |
| | | CACCAAGGCCCCCCTGTCCGCCTCCATGATCAAGCGGTACGACGAGCACCACCAGGACCTGACCCTGCTGAAGGCCCTGGTGCGG |
| | | CAGCAGCTGCCCGAGAAGTACAAGGAGATCTTCTTCGACCAGTCCAAGAACGGCTACGCCGGCTACATCGACGGCGGCGCCTCCC |
| | | AGGAGGAGTTCTACAAGTTCATCAAGCCCATCCTGGAGAAGATGGACGGCACCGAGGAGCTGCTGGTGAAGCTGAACCGGGAGGA |
| | | CCTGCTGCGGAAGCAGCGGACCTTCGACAACGGCTCCATCCCCCACCAGATCCACCTGGGCGAGCTGCACGCCATCCTGCGGCGG |
| | | CAGGAGGACTTCTACCCCTTCCTGAAGGACAACCGGGAGAAGATCGAGAAGATCCTGACCTTCCGGATCCCCTACTACGTGGGCC |
| | | CCCTGGCCCGGGGCAACTCCCGGTTCGCCTGGATGACCCGGAAGTCCGAGGAGACCATCACCCCCTGGAACTTCGAGGAGGTGGT |
| | | GGACAAGGGCGCCTCCGCCCAGTCCTTCATCGAGCGGATGACCAACTTCGACAAGAACCTGCCCAACGAGAAGGTGCTGCCCAAG |
| | | CACTCCCTGCTGTACGAGTACTTCACCGTGTACAACGAGCTGACCAAGGTGAAGTACGTGACCGAGGGCATGCGGAAGCCCGCCT |
| | | TCCTGTCCGGCGAGCAGAAGAAGGCCATCGTGGACCTGCTGTTCAAGACCAACCGGAAGGTGACCGTGAAGCAGCTGAAGGAGGA |
| | | CTACTTCAAGAAGATCGAGTGCTTCGACTCCGTGGAGATCTCCGGCGTGGAGGACCGGTTCAACGCCTCCCTGGGCACCTACCAC |
| | | GACCTGCTGAAGATCATCAAGGACAAGGACTTCCTGGACAACGAGGAGAACGAGGACATCCTGGAGGACATCGTGCTGACCCTGA |
| | | CCCTGTTCGAGGACCGGGAGATGATCGAGGAGCGGCTGAAGACCTACGCCCACCTGTTCGACGACAAGGTGATGAAGCAGCTGAA |
| | | GCGGCGGCGGTACACCGGCTGGGGCCGGCTGTCCCGGAAGCTGATCAACGGCATCCGGGACAAGCAGTCCGGCAAGACCATCCTG |
| | | GACTTCCTGAAGTCCGACGGCTTCGCCAACCGGAACTTCATGCAGCTGATCCACGACGACTCCCTGACCTTCAAGGAGGACATCC |
| | | AGAAGGCCCAGGTGTCCGGCCAGGGCGACTCCCTGCACGAGCACATCGCCAACCTGGCCGGCTCCCCCGCCATCAAGAAGGGCAT |
| | | CCTGCAGACCGTGAAGGTGGTGGACGAGCTGGTGAAGGTGATGGGCCGGCACAAGCCCGAGAACATCGTGATCGAGATGGCCCGG |
| | | GAGAACCAGACCACCCAGAAGGGCCAGAAGAACTCCCGGGAGCGGATGAAGCGGATCGAGGAGGGCATCAAGGAGCTGGGCTCCC |
| | | AGATCCTGAAGGAGCACCCCGTGGAGAACACCCAGCTGCAGAACGAGAAGCTGTACCTGTACTACCTGCAGAACGGCCGGGACAT |
| | | GTACGTGGACCAGGAGCTGGACATCAACCGGCTGTCCGACTACGACGTGGACCACATCGTGCCCCAGTCCTTCCTGAAGGACGAC |
| | | TCCATCGACAACAAGGTGCTGACCCGGTCCGACAAGAACCGGGGCAAGTCCGACAACGTGCCCTCCGAGGAGGTGGTGAAGAAGA |
| | | TGAAGAACTACTGGCGGCAGCTGCTGAACGCCAAGCTGATCACCCAGCGGAAGTTCGACAACCTGACCAAGGCCGAGCGGGGCGG |
| | | CCTGTCCGAGCTGGACAAGGCCGGCTTCATCAAGCGGCAGCTGGTGGAGACCCGGCAGATCACCAAGCACGTGGCCCAGATCCTG |
| | | GACTCCCGGATGAACACCAAGTACGACGAGAACGACAAGCTGATCCGGGAGGTGAAGGTGATCACCCTGAAGTCCAAGCTGGTGT |
| | | CCGACTTCCGGAAGGACTTCCAGTTCTACAAGGTGCGGGAGATCAACAACTACCACCACGCCCACGACGCCTACCTGAACGCCGT |
| | | GGTGGGCACCGCCCTGATCAAGAAGTACCCCAAGCTGGAGTCCGAGTTCGTGTACGGCGACTACAAGGTGTACGACGTGCGGAAG |
| | | ATGATCGCCAAGTCCGAGCAGGAGATCGGCAAGGCCACCGCCAAGTACTTCTTCTACTCCAACATCATGAACTTCTTCAAGACCG |
| | | AGATCACCCTGGCCAACGGCGAGATCCGGAAGCGGCCCCTGATCGAGACCAACGGCGAGACCGGCGAGATCGTGTGGGACAAGGG |
| | | CCGGGACTTCGCCACCGTGCGGAAGGTGCTGTCCATGCCCCAGGTGAACATCGTGAAGAAGACCGAGGTGCAGACCGGCGGCTTC |
| | | TCCAAGGAGTCCATCCTGCCCAAGCGGAACTCCGACAAGCTGATCGCCCGGAAGAAGGACTGGGACCCCAAGAAGTACGGCGGCT |
| | | TCGACTCCCCCACCGTGGCCTACTCCGTGCTGGTGGTGGCCAAGGTGGAGAAGGGCAAGTCCAAGAAGCTGAAGTCCGTGAAGGA |
| | | GCTGCTGGGCATCACCATCATGGAGCGGTCCTCCTTCGAGAAGAACCCCATCGACTTCCTGGAGGCCAAGGGCTACAAGGAGGTG |
| | | AAGAAGGACCTGATCATCAAGCTGCCCAAGTACTCCCTGTTCGAGCTGGAGAACGGCCGGAAGCGGATGCTGGCCTCCGCCGGCG |
| | | AGCTGCAGAAGGGCAACGAGCTGGCCCTGCCCTCCAAGTACGTGAACTTCCTGTACCTGGCCTCCCACTACGAGAAGCTGAAGGG |
| | | CTCCCCCGAGGACAACGAGCAGAAGCAGCTGTTCGTGGAGCAGCACAAGCACTACCTGGACGAGATCATCGAGCAGATCTCCGAG |
| | | TTCTCCAAGCGGGTGATCCTGGCCGACGCCAACCTGGACAAGGTGCTGTCCGCCTACAACAAGCACCGGGACAAGCCCATCCGGG |
| | | AGCAGGCCGAGAACATCATCCACCTGTTCACCCTGACCAACCTGGGCGCCCCCGCCGCCTTCAAGTACTTCGACACCACCATCGA |
| | | CCGGAAGCGGTACACCTCCACCAAGGAGGTGCTGGACGCCACCCTGATCCACCAGTCCATCACCGGCCTGTACGAGACCCGGATC |
| | | GACCTGTCCCAGCTGGGCGGCGACGGCGGCGGCTCCCCCAAGAAGAAGCGGAAGGTGTGA |
| Open reading frame | 803 | AUGGACAAGAAGUACUCCAUCGGCCUGGACAUCGGCACCAACUCCGUGGGCUGGGCCGUGAUCACCGACGAGUACAAGGUGCCCU |
| for Spy Cas9 with | | CCAAGAAGUUCAAGGUGCUGGGCAACACCGACCGGCACUCCAUCAAGAAGAACCUGAUCGGCGCCCUGCUGUUCGACUCCGGCGA |
| Hibit tag | | GACCGCCGAGGCCACCCGGCUGAAGCGGACCGCCCGGCGGCGGUACACCCGGCGGAAGAACCGGAUCUGCUACCUGCAGGAGAUC |
| | | UUCUCCAACGAGAUGGCCAAGGUGGACGACUCCUUCUUCCACCGGCUGGAGGAGUCCUUCCUGGUGGAGGAGGACAAGAAGCACG |
| | | AGCGGCACCCCAUCUUCGGCAACAUCGUGGACGAGGUGGCCUACCACGAGAAGUACCCCACCAUCUACCACCUGCGGAAGAAGCU |
| | | GGUGGACUCCACCGACAAGGCCGACCUGCGGCUGAUCUACCUGGCCCUGGCCCACAUGAUCAAGUUCCGGGGCCACUUCCUGAUC |
| | | GAGGGCGACCUGAACCCCGACAACUCCGACGUGGACAAGCUGUUCAUCCAGCUGGUGCAGACCUACAACCAGCUGUUCGAGGAGA |
| | | ACCCCAUCAACGCCUCCGGCGUGGACGCCAAGGCCAUCCUGUCCGCCCGGCUGUCCAAGUCCCGGCGGCUGGAGAACCUGAUCGC |
| | | CCAGCUGCCCGGCGAGAAGAAGAACGGCCUGUUCGGCAACCUGAUCGCCCUGUCCCUGGGCCUGACCCCCAACUUCAAGUCCAAC |
| | | UUCGACCUGGCCGAGGACGCCAAGCUGCAGCUGUCCAAGGACACCUACGACGACGACCUGGACAACCUGCUGGCCCAGAUCGGCG |
| | | ACCAGUACGCCGACCUGUUCCUGGCCGCCAAGAACCUGUCCGACGCCAUCCUGCUGUCCGACAUCCUGCGGGUGAACACCGAGAU |
| | | CACCAAGGCCCCCCUGUCCGCCUCCAUGAUCAAGCGGUACGACGAGCACCACCAGGACCUGACCCUGCUGAAGGCCCUGGUGCGG |
| | | CAGCAGCUGCCCGAGAAGUACAAGGAGAUCUUCUUCGACCAGUCCAAGAACGGCUACGCCGGCUACAUCGACGGCGGCGCCUCCC |
| | | AGGAGGAGUUCUACAAGUUCAUCAAGCCCAUCCUGGAGAAGAUGGACGGCACCGAGGAGCUGCUGGUGAAGCUGAACCGGGAGGA |
| | | CCUGCUGCGGAAGCAGCGGACCUUCGACAACGGCUCCAUCCCCCACCAGAUCCACCUGGGCGAGCUGCACGCCAUCCUGCGGCGG |
| | | CAGGAGGACUUCUACCCCUUCCUGAAGGACAACCGGGAGAAGAUCGAGAAGAUCCUGACCUUCCGGAUCCCCUACUACGUGGGCC |
| | | CCCUGGCCCGGGGCAACUCCCGGUUCGCCUGGAUGACCCGGAAGUCCGAGGAGACCAUCACCCCCUGGAACUUCGAGGAGGUGGU |
| | | GGACAAGGGCGCCUCCGCCCAGUCCUUCAUCGAGCGGAUGACCAACUUCGACAAGAACCUGCCCAACGAGAAGGUGCUGCCCAAG |
| | | CACUCCCUGCUGUACGAGUACUUCACCGUGUACAACGAGCUGACCAAGGUGAAGUACGUGACCGAGGGCAUGCGGAAGCCCGCCU |
| | | UCCUGUCCGGCGAGCAGAAGAAGGCCAUCGUGGACCUGCUGUUCAAGACCAACCGGAAGGUGACCGUGAAGCAGCUGAAGGAGGA |
| | | CUACUUCAAGAAGAUCGAGUGCUUCGACUCCGUGGAGAUCUCCGGCGUGGAGGACCGGUUCAACGCCUCCCUGGGCACCUACCAC |
| | | GACCUGCUGAAGAUCAUCAAGGACAAGGACUUCCUGGACAACGAGGAGAACGAGGACAUCCUGGAGGACAUCGUGCUGACCCUGA |
| | | CCCUGUUCGAGGACCGGGAGAUGAUCGAGGAGCGGCUGAAGACCUACGCCCACCUGUUCGACGACAAGGUGAUGAAGCAGCUGAA |
| | | GCGGCGGCGGUACACCGGCUGGGGCCGGCUGUCCCGGAAGCUGAUCAACGGCAUCCGGGACAAGCAGUCCGGCAAGACCAUCCUG |
| | | GACUUCCUGAAGUCCGACGGCUUCGCCAACCGGAACUUCAUGCAGCUGAUCCACGACGACUCCCUGACCUUCAAGGAGGACAUCC |
| | | AGAAGGCCCAGGUGUCCGGCCAGGGCGACUCCCUGCACGAGCACAUCGCCAACCUGGCCGGCUCCCCCGCCAUCAAGAAGGGCAU |
| | | CCUGCAGACCGUGAAGGUGGUGGACGAGCUGGUGAAGGUGAUGGGCCGGCACAAGCCCGAGAACAUCGUGAUCGAGAUGGCCCGG |
| | | GAGAACCAGACCACCCAGAAGGGCCAGAAGAACUCCCGGGAGCGGAUGAAGCGGAUCGAGGAGGGCAUCAAGGAGCUGGGCUCCC |
| | | AGAUCCUGAAGGAGCACCCCGUGGAGAACACCCAGCUGCAGAACGAGAAGCUGUACCUGUACUACCUGCAGAACGGCCGGGACAU |
| | | GUACGUGGACCAGGAGCUGGACAUCAACCGGCUGUCCGACUACGACGUGGACCACAUCGUGCCCCAGUCCUUCCUGAAGGACGAC |
| | | UCCAUCGACAACAAGGUGCUGACCCGGUCCGACAAGAACCGGGGCAAGUCCGACAACGUGCCCUCCGAGGAGGUGGUGAAGAAGA |
| | | UGAAGAACUACUGGCGGCAGCUGCUGAACGCCAAGCUGAUCACCCAGCGGAAGUUCGACAACCUGACCAAGGCCGAGCGGGGCGG |
| | | CCUGUCCGAGCUGGACAAGGCCGGCUUCAUCAAGCGGCAGCUGGUGGAGACCCGGCAGAUCACCAAGCACGUGGCCCAGAUCCUG |
| | | GACUCCCGGAUGAACACCAAGUACGACGAGAACGACAAGCUGAUCCGGGAGGUGAAGGUGAUCACCCUGAAGUCCAAGCUGGUGU |
| | | CCGACUUCCGGAAGGACUUCCAGUUCUACAAGGUGCGGGAGAUCAACAACUACCACCACGCCCACGACGCCUACCUGAACGCCGU |
| | | GGUGGGCACCGCCCUGAUCAAGAAGUACCCCAAGCUGGAGUCCGAGUUCGUGUACGGCGACUACAAGGUGUACGACGUGCGGAAG |
| | | AUGAUCGCCAAGUCCGAGCAGGAGAUCGGCAAGGCCACCGCCAAGUACUUCUUCUACUCCAACAUCAUGAACUUCUUCAAGACCG |
| | | AGAUCACCCUGGCCAACGGCGAGAUCCGGAAGCGGCCCCUGAUCGAGACCAACGGCGAGACCGGCGAGAUCGUGUGGGACAAGGG |
| | | CCGGGACUUCGCCACCGUGCGGAAGGUGCUGUCCAUGCCCCAGGUGAACAUCGUGAAGAAGACCGAGGUGCAGACCGGCGGCUUC |
| | | UCCAAGGAGUCCAUCCUGCCCAAGCGGAACUCCGACAAGCUGAUCGCCCGGAAGAAGGACUGGGACCCCAAGAAGUACGGCGGCU |
| | | UCGACUCCCCCACCGUGGCCUACUCCGUGCUGGUGGUGGCCAAGGUGGAGAAGGGCAAGUCCAAGAAGCUGAAGUCCGUGAAGGA |
| | | GCUGCUGGGCAUCACCAUCAUGGAGCGGUCCUCCUUCGAGAAGAACCCCAUCGACUUCCUGGAGGCCAAGGGCUACAAGGAGGUG |
| | | AAGAAGGACCUGAUCAUCAAGCUGCCCAAGUACUCCCUGUUCGAGCUGGAGAACGGCCGGAAGCGGAUGCUGGCCUCCGCCGGCG |
| | | AGCUGCAGAAGGGCAACGAGCUGGCCCUGCCCUCCAAGUACGUGAACUUCCUGUACCUGGCCUCCCACUACGAGAAGCUGAAGGG |
| | | CUCCCCCGAGGACAACGAGCAGAAGCAGCUGUUCGUGGAGCAGCACAAGCACUACCUGGACGAGAUCAUCGAGCAGAUCUCCGAG |
| | | UUCUCCAAGCGGGUGAUCCUGGCCGACGCCAACCUGGACAAGGUGCUGUCCGCCUACAACAAGCACCGGGACAAGCCCAUCCGGG |
| | | AGCAGGCCGAGAACAUCAUCCACCUGUUCACCCUGACCAACCUGGGCGCCCCCGCCGCCUUCAAGUACUUCGACACCACCAUCGA |
| | | CCGGAAGCGGUACACCUCCACCAAGGAGGUGCUGGACGCCACCCUGAUCCACCAGUCCAUCACCGGCCUGUACGAGACCCGGAUC |
| | | GACCUGUCCCAGCUGGGCGGCGACGGCGGCGGCUCCCCCAAGAAGAAGCGGAAGGUGUCCGAGUCCGCCACCCCCGAGUCCGUGU |
| | | CCGGCUGGCGGCUGUUCAAGAAGAUCUCCUGA |
| Open Reading frame | 804 | AUGgaggccucccccgccuccggcccccggcaccugauggacccccacaucuucaccuccAACUUCAACAACggcAUCggccggC |
| for BC22n | | ACAAGaccUACCUGUGCUACgagguggagcggCUGGACAACggcaccuccgugAAGAUGGACCAGCACcggggcUUCCUGCACAA |
| | | CCAGgccAAGAACCUGCUGUGCggcUUCUACggccggCACgccgagCUGcggUUCCUGGACCUGgugcccuccCUGCAGCUGGAC |
| | | cccgccCAGAUCUACcgggugaccUGGUUCAUCuccUGGucccccUGCUUCuccUGGggcUGCgccggcgaggugcgggccUUCC |
| | | UGCAGgagAACaccCACgugcggCUGcggAUCUUCgccgcccggAUCUACGACUACGACcccCUGUACAAGgaggccCUGCAGAU |
| | | GCUGcggGACgccggcgccCAGguguccAUCAUGaccUACGACgagUUCAAGCACUGCUGGGACaccUUCgugGACCACCAGggc |
| | | UGCcccUUCCAGcccUGGGACggcCUGGACgagCACuccCAGgccCUGuccggccggCUGcgggccAUCCUGCAGAACCAGggcA |
| | | ACuccggcuccgagacccccggcaccuccgaguccgccacccccgaguccgacaagaaguacuccaucggccuggCcaucggcac |
| | | caacuccgugggcugggccgugaucaccgacgaguacaaggugcccuccaagaaguucaaggugcugggcaacaccgaccggcac |
| | | uccaucaagaagaaccugaucggcgcccugcuguucgacuccggcgagaccgccgaggccacccggcugaagcggaccgcccggc |
| | | ggcgguacacccggcggaagaaccggaucugcuaccugcaggagaucuucuccaacgagauggccaagguggacgacuccuucuu |
| | | ccaccggcuggaggaguccuuccugguggaggaggacaagaagcacgagcggcaccccaucuucggcaacaucguggacgaggug |
| | | gccuaccacgagaaguaccccaccaucuaccaccugcggaagaagcugguggacuccaccgacaaggccgaccugcggcugaucu |
| | | accuggcccuggcccacaugaucaaguuccggggccacuuccugaucgagggcgaccugaaccccgacaacuccgacguggacaa |
| | | gcuguucauccagcuggugcagaccuacaaccagcuguucgaggagaaccccaucaacgccuccggcguggacgccaaggccauc |
| | | cuguccgcccggcuguccaagucccggcggcuggagaaccugaucgcccagcugcccggcgagaagaagaacggccuguucggca |
| | | accugaucgcccugucccugggccugacccccaacuucaaguccaacuucgaccuggccgaggacgccaagcugcagcuguccaa |
| | | ggacaccuacgacgacgaccuggacaaccugcuggcccagaucggcgaccaguacgccgaccuguuccuggccgccaagaaccug |
| | | uccgacgccauccugcuguccgacauccugcgggugaacaccgagaucaccaaggccccccuguccgccuccaugaucaagcggu |
| | | acgacgagcaccaccaggaccugacccugcugaaggcccuggugcggcagcagcugcccgagaaguacaaggagaucuucuucga |
| | | ccaguccaagaacggcuacgccggcuacaucgacggcggcgccucccaggaggaguucuacaaguucaucaagcccauccuggag |
| | | aagauggacggcaccgaggagcugcuggugaagcugaaccgggaggaccugcugcggaagcagcggaccuucgacaacggcucca |
| | | ucccccaccagauccaccugggcgagcugcacgccauccugcggcggcaggaggacuucuaccccuuccugaaggacaaccggga |
| | | gaagaucgagaagauccugaccuuccggauccccuacuacgugggcccccuggcccggggcaacucccgguucgccuggaugacc |
| | | cggaaguccgaggagaccaucacccccuggaacuucgaggaggugguggacaagggcgccuccgcccaguccuucaucgagcgga |
| | | ugaccaacuucgacaagaaccugcccaacgagaaggugcugcccaagcacucccugcuguacgaguacuucaccguguacaacga |
| | | gcugaccaaggugaaguacgugaccgagggcaugcggaagcccgccuuccuguccggcgagcagaagaaggccaucguggaccug |
| | | cuguucaagaccaaccggaaggugaccgugaagcagcugaaggaggacuacuucaagaagaucgagugcuucgacuccguggaga |
| | | ucuccggcguggaggaccgguucaacgccucccugggcaccuaccacgaccugcugaagaucaucaaggacaaggacuuccugga |
| | | caacgaggagaacgaggacauccuggaggacaucgugcugacccugacccuguucgaggaccgggagaugaucgaggagcggcug |
| | | aagaccuacgcccaccuguucgacgacaaggugaugaagcagcugaagcggcggcgguacaccggcuggggccggcugucccgga |
| | | agcugaucaacggcauccgggacaagcaguccggcaagaccauccuggacuuccugaaguccgacggcuucgccaaccggaacuu |
| | | caugcagcugauccacgacgacucccugaccuucaaggaggacauccagaaggcccagguguccggccagggcgacucccugcac |
| | | gagcacaucgccaaccuggccggcucccccgccaucaagaagggcauccugcagaccgugaaggugguggacgagcuggugaagg |
| | | ugaugggccggcacaagcccgagaacaucgugaucgagauggcccgggagaaccagaccacccagaagggccagaagaacucccg |
| | | ggagcggaugaagcggaucgaggagggcaucaaggagcugggcucccagauccugaaggagcaccccguggagaacacccagcug |
| | | cagaacgagaagcuguaccuguacuaccugcagaacggccgggacauguacguggaccaggagcuggacaucaaccggcuguccg |
| | | acuacgacguggaccacaucgugccccaguccuuccugaaggacgacuccaucgacaacaaggugcugacccgguccgacaagaa |
| | | ccggggcaaguccgacaacgugcccuccgaggagguggugaagaagaugaagaacuacuggcggcagcugcugaacgccaagcug |
| | | aucacccagcggaaguucgacaaccugaccaaggccgagcggggCggccuguccgagcuggacaaggccggcuucaucaagcggc |
| | | agcugguggagacccggcagaucaccaagcacguggcccagauccuggacucccggaugaacaccaaguacgacgagaacgacaa |
| | | gcugauccgggaggugaaggugaucacccugaaguccaagcugguguccgacuuccggaaggacuuccaguucuacaaggugcgg |
| | | gagaucaacaacuaccaccacgcccacgacgccuaccugaacgccguggugggcaccgcccugaucaagaaguaccccaagcugg |
| | | aguccgaguucguguacggcgacuacaagguguacgacgugcggaagaugaucgccaaguccgagcaggagaucggcaaggccac |
| | | cgccaaguacuucuucuacuccaacaucaugaacuucuucaagaccgagaucacccuggccaacggcgagauccggaagcggccc |
| | | cugaucgagaccaacggcgagaccggcgagaucgugugggacaagggccgggacuucgccaccgugcggaaggugcuguccaugc |
| | | cccaggugaacaucgugaagaagaccgaggugcagaccggcggcuucuccaaggaguccauccugcccaagcggaacuccgacaa |
| | | gcugaucgcccggaagaaggacugggaccccaagaaguacggcggcuucgacucccccaccguggccuacuccgugcugguggug |
| | | gccaagguggagaagggcaaguccaagaagcugaaguccgugaaggagcugcugggcaucaccaucauggagcgguccuccuucg |
| | | agaagaaccccaucgacuuccuggaggccaagggcuacaaggaggugaagaaggaccugaucaucaagcugcccaaguacucccu |
| | | guucgagcuggagaacggccggaagcggaugcuggccuccgccggcgagcugcagaagggcaacgagcuggcccugcccuccaag |
| | | uacgugaacuuccuguaccuggccucccacuacgagaagcugaagggcucccccgaggacaacgagcagaagcagcuguucgugg |
| | | agcagcacaagcacuaccuggacgagaucaucgagcagaucuccgaguucuccaagcgggugauccuggccgacgccaaccugga |
| | | caaggugcuguccgccuacaacaagcaccgggacaagcccauccgggagcaggccgagaacaucauccaccuguucacccugacc |
| | | aaccugggcgcccccgccgccuucaaguacuucgacaccaccaucgaccggaagcgguacaccuccaccaaggaggugcuggacg |
| | | ccacccugauccaccaguccaucaccggccuguacgagacccggaucgaccugucccagcugggcggcgacggcggcggcucccc |
| | | caagaagaagcggaaggugUgA |
| Open reading frame | 805 | AUGgaggccucccccgccuccggcccccggcaccugauggacccccacaucuucaccuccAACUUCAACAACggcAUCggccggC |
| for BC22n with Hibit | | ACAAGaccUACCUGUGCUACgagguggagcggCUGGACAACggcaccuccgugAAGAUGGACCAGCACcggggcUUCCUGCACAA |
| tag | | CCAGgccAAGAACCUGCUGUGCggcUUCUACggccggCACgccgagCUGcggUUCCUGGACCUGgugcccuccCUGCAGCUGGAC |
| | | cccgccCAGAUCUACcgggugaccUGGUUCAUCuccUGGucccccUGCUUCuccUGGggcUGCgccggcgaggugcgggccUUCC |
| | | UGCAGgagAACaccCACgugcggCUGcggAUCUUCgccgcccggAUCUACGACUACGACcccCUGUACAAGgaggccCUGCAGAU |
| | | GCUGcggGACgccggcgccCAGguguccAUCAUGaccUACGACgagUUCAAGCACUGCUGGGACaccUUCgugGACCACCAGggc |
| | | UGCcccUUCCAGcccUGGGACggcCUGGACgagCACuccCAGgccCUGuccggccggCUGcgggccAUCCUGCAGAACCAGggcA |
| | | ACuccggcuccgagacccccggcaccuccgaguccgccacccccgaguccgacaagaaguacuccaucggccuggCcaucggcac |
| | | caacuccgugggcugggccgugaucaccgacgaguacaaggugcccuccaagaaguucaaggugcugggcaacaccgaccggcac |
| | | uccaucaagaagaaccugaucggcgcccugcuguucgacuccggcgagaccgccgaggccacccggcugaagcggaccgcccggc |
| | | ggcgguacacccggcggaagaaccggaucugcuaccugcaggagaucuucuccaacgagauggccaagguggacgacuccuucuu |
| | | ccaccggcuggaggaguccuuccugguggaggaggacaagaagcacgagcggcaccccaucuucggcaacaucguggacgaggug |
| | | gccuaccacgagaaguaccccaccaucuaccaccugcggaagaagcugguggacuccaccgacaaggccgaccugcggcugaucu |
| | | accuggcccuggcccacaugaucaaguuccggggccacuuccugaucgagggcgaccugaaccccgacaacuccgacguggacaa |
| | | gcuguucauccagcuggugcagaccuacaaccagcuguucgaggagaaccccaucaacgccuccggcguggacgccaaggccauc |
| | | cuguccgcccggcuguccaagucccggcggcuggagaaccugaucgcccagcugcccggcgagaagaagaacggccuguucggca |
| | | accugaucgcccugucccugggccugacccccaacuucaaguccaacuucgaccuggccgaggacgccaagcugcagcuguccaa |
| | | ggacaccuacgacgacgaccuggacaaccugcuggcccagaucggcgaccaguacgccgaccuguuccuggccgccaagaaccug |
| | | uccgacgccauccugcuguccgacauccugcgggugaacaccgagaucaccaaggccccccuguccgccuccaugaucaagcggu |
| | | acgacgagcaccaccaggaccugacccugcugaaggcccuggugcggcagcagcugcccgagaaguacaaggagaucuucuucga |
| | | ccaguccaagaacggcuacgccggcuacaucgacggcggcgccucccaggaggaguucuacaaguucaucaagcccauccuggag |
| | | aagauggacggcaccgaggagcugcuggugaagcugaaccgggaggaccugcugcggaagcagcggaccuucgacaacggcucca |
| | | ucccccaccagauccaccugggcgagcugcacgccauccugcggcggcaggaggacuucuaccccuuccugaaggacaaccggga |
| | | gaagaucgagaagauccugaccuuccggauccccuacuacgugggcccccuggcccggggcaacucccgguucgccuggaugacc |
| | | cggaaguccgaggagaccaucacccccuggaacuucgaggaggugguggacaagggcgccuccgcccaguccuucaucgagcgga |
| | | ugaccaacuucgacaagaaccugcccaacgagaaggugcugcccaagcacucccugcuguacgaguacuucaccguguacaacga |
| | | gcugaccaaggugaaguacgugaccgagggcaugcggaagcccgccuuccuguccggcgagcagaagaaggccaucguggaccug |
| | | cuguucaagaccaaccggaaggugaccgugaagcagcugaaggaggacuacuucaagaagaucgagugcuucgacuccguggaga |
| | | ucuccggcguggaggaccgguucaacgccucccugggcaccuaccacgaccugcugaagaucaucaaggacaaggacuuccugga |
| | | caacgaggagaacgaggacauccuggaggacaucgugcugacccugacccuguucgaggaccgggagaugaucgaggagcggcug |
| | | aagaccuacgcccaccuguucgacgacaaggugaugaagcagcugaagcggcggcgguacaccggcuggggccggcugucccgga |
| | | agcugaucaacggcauccgggacaagcaguccggcaagaccauccuggacuuccugaaguccgacggcuucgccaaccggaacuu |
| | | caugcagcugauccacgacgacucccugaccuucaaggaggacauccagaaggcccagguguccggccagggcgacucccugcac |
| | | gagcacaucgccaaccuggccggcucccccgccaucaagaagggcauccugcagaccgugaaggugguggacgagcuggugaagg |
| | | ugaugggccggcacaagcccgagaacaucgugaucgagauggcccgggagaaccagaccacccagaagggccagaagaacucccg |
| | | ggagcggaugaagcggaucgaggagggcaucaaggagcugggcucccagauccugaaggagcaccccguggagaacacccagcug |
| | | cagaacgagaagcuguaccuguacuaccugcagaacggccgggacauguacguggaccaggagcuggacaucaaccggcuguccg |
| | | acuacgacguggaccacaucgugccccaguccuuccugaaggacgacuccaucgacaacaaggugcugacccgguccgacaagaa |
| | | ccggggcaaguccgacaacgugcccuccgaggagguggugaagaagaugaagaacuacuggcggcagcugcugaacgccaagcug |
| | | aucacccagcggaaguucgacaaccugaccaaggccgagcggggcggccuguccgagcuggacaaggccggcuucaucaagcggc |
| | | agcugguggagacccggcagaucaccaagcacguggcccagauccuggacucccggaugaacaccaaguacgacgagaacgacaa |
| | | gcugauccgggaggugaaggugaucacccugaaguccaagcugguguccgacuuccggaaggacuuccaguucuacaaggugcgg |
| | | gagaucaacaacuaccaccacgcccacgacgccuaccugaacgccguggugggcaccgcccugaucaagaaguaccccaagcugg |
| | | aguccgaguucguguacggcgacuacaagguguacgacgugcggaagaugaucgccaaguccgagcaggagaucggcaaggccac |
| | | cgccaaguacuucuucuacuccaacaucaugaacuucuucaagaccgagaucacccuggccaacggcgagauccggaagcggccc |
| | | cugaucgagaccaacggcgagaccggcgagaucgugugggacaagggccgggacuucgccaccgugcggaaggugcuguccaugc |
| | | cccaggugaacaucgugaagaagaccgaggugcagaccggcggcuucuccaaggaguccauccugcccaagcggaacuccgacaa |
| | | gcugaucgcccggaagaaggacugggaccccaagaaguacggcggcuucgacucccccaccguggccuacuccgugcugguggug |
| | | gccaagguggagaagggcaaguccaagaagcugaaguccgugaaggagcugcugggcaucaccaucauggagcgguccuccuucg |
| | | agaagaaccccaucgacuuccuggaggccaagggcuacaaggaggugaagaaggaccugaucaucaagcugcccaaguacucccu |
| | | guucgagcuggagaacggccggaagcggaugcuggccuccgccggcgagcugcagaagggcaacgagcuggcccugcccuccaag |
| | | uacgugaacuuccuguaccuggccucccacuacgagaagcugaagggcucccccgaggacaacgagcagaagcagcuguucgugg |
| | | agcagcacaagcacuaccuggacgagaucaucgagcagaucuccgaguucuccaagcgggugauccuggccgacgccaaccugga |
| | | caaggugcuguccgccuacaacaagcaccgggacaagcccauccgggagcaggccgagaacaucauccaccuguucacccugacc |
| | | aaccugggcgcccccgccgccuucaaguacuucgacaccaccaucgaccggaagcgguacaccuccaccaaggaggugcuggacg |
| | | ccacccugauccaccaguccaucaccggccuguacgagacccggaucgaccugucccagcugggcggcgacggcggcggcucccc |
| | | caagaagaagcggaagguguccgaguccgccacccccgaguccguguccggcuggcggcuguucaagaagaucuccUgA |
| ORF encoding Spy Cas9 | 806 | ATGgaggccTcccccgccTccggcccccggcaccTgaTggacccccacaTcTTcaccTccAACTTCAACAACggcATCggccggC |
| | | ACAAGaccTACCTGTGCTACgaggTggagcggCTGGACAACggcaccTccgTgAAGATGGACCAGCACcggggcTTCCTGCACAA |
| | | CCAGgccAAGAACCTGCTGTGCggcTTCTACggccggCACgccgagCTGcggTTCCTGGACCTGgTgcccTccCTGCAGCTGGAC |
| | | cccgccCAGATCTACcgggTgaccTGGTTCATCTccTGGTCCCCCTGCTTCTccTGGggcTGCgccggcgaggTgcgggccTTCC |
| | | TGCAGgagAACaccCACgTgcggCTGcggATCTTCgccgcccggATCTACGACTACGACcccCTGTACAAGgaggccCTGCAGAT |
| | | GCTGcggGACgccggcgccCAGgTgTccATCATGaccTACGACgagTTCAAGCACTGCTGGGACaccTTCgTgGACCACCAGggc |
| | | TGCcccTTCCAGcccTGGGACggcCTGGACgagCACTccCAGgccCTGTccggccggCTGcgggccATCCTGCAGAACCAGggcA |
| | | ACTccggcTccgagacccccggcaccTccgagTccgccacccccgagTccgacaagaagTacTccaTcggccTggCcaTcggcac |
| | | caacTccgTgggcTgggccgTgaTcaccgacgagTacaaggTgcccTccaagaagTTcaaggTgcTgggcaacaccgaccggcac |
| | | TccaTcaagaagaaccTgaTcggcgcccTgcTgTTcgacTccggcgagaccgccgaggccacccggcTgaagcggaccgcccggc |
| | | ggcggTacacccggcggaagaaccggaTcTgcTaccTgcaggagaTcTTcTccaacgagaTggccaaggTggacgacTccTTcTT |
| | | ccaccggcTggaggagTccTTccTggTggaggaggacaagaagcacgagcggcaccccaTcTTcggcaacaTcgTggacgaggTg |
| | | gccTaccacgagaagTaccccaccaTcTaccaccTgcggaagaagcTggTggacTccaccgacaaggccgaccTgcggcTgaTcT |
| | | accTggcccTggcccacaTgaTcaagTTccggggccacTTccTgaTcgagggcgaccTgaaccccgacaacTccgacgTggacaa |
| | | gcTgTTcaTccagcTggTgcagaccTacaaccagcTgTTcgaggagaaccccaTcaacgccTccggcgTggacgccaaggccaTc |
| | | cTgTccgcccggcTgTccaagTcccggcggcTggagaaccTgaTcgcccagcTgcccggcgagaagaagaacggccTgTTcggca |
| | | accTgaTcgcccTgTcccTgggccTgacccccaacTTcaagTccaacTTcgaccTggccgaggacgccaagcTgcagcTgTccaa |
| | | ggacaccTacgacgacgaccTggacaaccTgcTggcccagaTcggcgaccagTacgccgaccTgTTccTggccgccaagaaccTg |
| | | TccgacgccaTccTgcTgTccgacaTccTgcgggTgaacaccgagaTcaccaaggccccccTgTccgccTccaTgaTcaagcggT |
| | | acgacgagcaccaccaggaccTgacccTgcTgaaggcccTggTgcggcagcagcTgcccgagaagTacaaggagaTcTTcTTcga |
| | | ccagTccaagaacggcTacgccggcTacaTcgacggcggcgccTcccaggaggagTTcTacaagTTcaTcaagcccaTccTggag |
| | | aagaTggacggcaccgaggagcTgcTggTgaagcTgaaccgggaggaccTgcTgcggaagcagcggaccTTcgacaacggcTcca |
| | | TcccccaccagaTccaccTgggcgagcTgcacgccaTccTgcggcggcaggaggacTTcTaccccTTccTgaaggacaaccggga |
| | | gaagaTcgagaagaTccTgaccTTccggaTccccTacTacgTgggcccccTggcccggggcaacTcccggITcgccTggaTgacc |
| | | cggaagTccgaggagaccaTcacccccTggaacTTcgaggaggTggTggacaagggcgccTccgcccagTccTTcaTcgagcgga |
| | | TgaccaacTTcgacaagaaccTgcccaacgagaaggTgcTgcccaagcacTcccTgcTgTacgagTacTTcaccgTgTacaacga |
| | | gcTgaccaaggTgaagTacgTgaccgagggcaTgcggaagcccgccTTccTgTccggcgagcagaagaaggccaTcgTggaccTg |
| | | cTgTTcaagaccaaccggaaggTgaccgTgaagcagcTgaaggaggacTacTTcaagaagaTcgagTgcTTcgacTccgTggaga |
| | | TcTccggcgTggaggaccggTTcaacgccTcccTgggcaccTaccacgaccTgcTgaagaTcaTcaaggacaaggacTTccTgga |
| | | caacgaggagaacgaggacaTccTggaggacaTcgTgcTgacccTgacccTgTTcgaggaccgggagaTgaTcgaggagcggcTg |
| | | aagaccTacgcccaccTgTTcgacgacaaggTgaTgaagcagcTgaagcggcggcggTacaccggcTggggccggcTgTcccgga |
| | | agcTgaTcaacggcaTccgggacaagcagTccggcaagaccaTccTggacTTccTgaagTccgacggcTTcgccaaccggaacTT |
| | | caTgcagcTgaTccacgacgacTcccTgaccTTcaaggaggacaTccagaaggcccaggTgTccggccagggcgacTcccTgcac |
| | | gagcacaTcgccaaccTggccggcTcccccgccaTcaagaagggcaTccTgcagaccgTgaaggTggTggacgagcTggTgaagg |
| | | TgaTgggccggcacaagcccgagaacaTcgTgaTcgagaTggcccgggagaaccagaccacccagaagggccagaagaacTcccg |
| | | ggagcggaTgaagcggaTcgaggagggcaTcaaggagcTgggcTcccagaTccTgaaggagcaccccgTggagaacacccagcTg |
| | | cagaacgagaagcTgTaccTgTacTaccTgcagaacggccgggacaTgTacgTggaccaggagcTggacaTcaaccggcTgTccg |
| | | acTacgacgTggaccacaTcgTgccccagTccTTccTgaaggacgacTccaTcgacaacaaggTgcTgacccggTccgacaagaa |
| | | ccggggcaagTccgacaacgTgcccTccgaggaggTggTgaagaagaTgaagaacTacTggcggcagcTgcTgaacgccaagcTg |
| | | aTcacccagcggaagTTcgacaaccTgaccaaggccgagcggggcggccTgTccgagcTggacaaggccggcTTcaTcaagcggc |
| | | agcTggTggagacccggcagaTcaccaagcacgTggcccagaTccTggacTcccggaTgaacaccaagTacgacgagaacgacaa |
| | | gcTgaTccgggaggTgaaggTgaTcacccTgaagTccaagcTggTgTccgacTTccggaaggacTTccagTTcTacaaggTgcgg |
| | | gagaTcaacaacTaccaccacgcccacgacgccTaccTgaacgccgTggTgggcaccgcccTgaTcaagaagTaccccaagcTgg |
| | | agTccgagTTcgTgTacggcgacTacaaggTgTacgacgTgcggaagaTgaTcgccaagTccgagcaggagaTcggcaaggccac |
| | | cgccaagTacTTcTTcTacTccaacaTcaTgaacTTcTTcaagaccgagaTcacccTggccaacggcgagaTccggaagcggccc |
| | | cTgaTcgagaccaacggcgagaccggcgagaTcgTgTgggacaagggccgggacTTcgccaccgTgcggaaggTgcTgTccaTgc |
| | | cccaggTgaacaTcgTgaagaagaccgaggTgcagaccggcggcTTcTccaaggagTccaTccTgcccaagcggaacTccgacaa |
| | | gcTgaTcgcccggaagaaggacTgggaccccaagaagTacggcggcTTcgacTcccccaccgTggccTacTccgTgcTggTggTg |
| | | gccaaggTggagaagggcaagTccaagaagcTgaagTccgTgaaggagcTgcTgggcaTcaccaTcaTggagcggTccTccTTcg |
| | | agaagaaccccaTcgacTTccTggaggccaagggcTacaaggaggTgaagaaggaccTgaTcaTcaagcTgcccaagTacTcccT |
| | | gTTcgagcTggagaacggccggaagcggaTgcTggccTccgccggcgagcTgcagaagggcaacgagcTggcccTgcccTccaag |
| | | TacgTgaacTTccTgTaccTggccTcccacTacgagaagcTgaagggcTcccccgaggacaacgagcagaagcagcTgTTcgTgg |
| | | agcagcacaagcacTaccTggacgagaTcaTcgagcagaTcTccgagTTcTccaagcgggTgaTccTggccgacgccaaccTgga |
| | | caaggTgcTgTccgccTacaacaagcaccgggacaagcccaTccgggagcaggccgagaacaTcaTccaccTgTTcacccTgacc |
| | | aaccTgggcgcccccgccgccTTcaagTacTTcgacaccaccaTcgaccggaagcggTacaccTccaccaaggaggTgcTggacg |
| | | ccacccTgaTccaccagTccaTcaccggccTgTacgagacccggaTcgaccTgTcccagcTgggcggcgacggcggcggcTcccc |
| | | caagaagaagcggaaggTgTgA |
| Open reading frame | 807 | AUGGGACCGAAGAAGAAGAGAAAGGUCGGAGGAGGAAGCACAAACCUGUCGGACAUCAUCGAAAAGGAAACAGGAAAGCAGCUGG |
| for UGI | | UCAUCCAGGAAUCGAUCCUGAUGCUGCCGGAAGAAGUCGAAGAAGUCAUCGGAAACAAGCCGGAAUCGGACAUCCUGGUCCACAC |
| | | AGCAUACGACGAAUCGACAGACGAAAACGUCAUGCUGCUGACAUCGGACGCACCGGAAUACAAGCCGUGGGCACUGGUCAUCCAG |
| | | GACUCGAACGGAGAAAACAAGAUCAAGAUGCUGUGA |
| Open reading frame | 808 | AUGACCAACCUGUCCGACAUCAUCGAGAAGGAGACCGGCAAGCAGCUGGUGAUCCAGGAGUCCAUCCUGAUGCUGCCCGAGGAGG |
| for UGI | | UGGAGGAGGUGAUCGGCAACAAGCCCGAGUCCGACAUCCUGGUGCACACCGCCUACGACGAGUCCACCGACGAGAACGUGAUGCU |
| | | GCUGACCUCCGACGCCCCCGAGUACAAGCCCUGGGCCCUGGUGAUCCAGGACUCCAACGGCGAGAACAAGAUCAAGAUGCUGUCC |
| | | GGCGGCUCCAAGCGGACCGCCGACGGCUCCGAGUUCGAGUCCCCCAAGAAGAAGCGGAAGGUGGAGUGA |
| Amino acid sequence | 809 | MDKKYSIGLDIGTNSVGWAVITDEYKVPSKKFKVLGNTDRHSIKKNLIGALLFDSGETAEATRLKRTARRRYTRRKNRICYLQEI |
| for Cas9 encoded by | | FSNEMAKVDDSFFHRLEESFLVEEDKKHERHPIFGNIVDEVAYHEKYPTIYHLRKKLVDSTDKADLRLIYLALAHMIKFRGHFLI |
| SEQ ID Nos. 801-802 | | EGDLNPDNSDVDKLFIQLVQTYNQLFEENPINASGVDAKAILSARLSKSRRLENLIAQLPGEKKNGLFGNLIALSLGLTPNFKSN |
| | | FDLAEDAKLQLSKDTYDDDLDNLLAQIGDQYADLELAAKNLSDAILLSDILRVNTEITKAPLSASMIKRYDEHHQDLTLLKALVR |
| | | QQLPEKYKEIFFDQSKNGYAGYIDGGASQEEFYKFIKPILEKMDGTEELLVKLNREDLLRKQRTFDNGSIPHQIHLGELHAILRR |
| | | QEDFYPFLKDNREKIEKILTFRIPYYVGPLARGNSRFAWMTRKSEETITPWNFEEVVDKGASAQSFIERMTNFDKNLPNEKVLPK |
| | | HSLLYEYFTVYNELTKVKYVTEGMRKPAFLSGEQKKAIVDLLFKTNRKVTVKQLKEDYFKKIECFDSVEISGVEDRFNASLGTYH |
| | | DLLKIIKDKDFLDNEENEDILEDIVLTLTLFEDREMIEERLKTYAHLFDDKVMKQLKRRRYTGWGRLSRKLINGIRDKQSGKTIL |
| | | DFLKSDGFANRNFMQLIHDDSLTFKEDIQKAQVSGQGDSLHEHIANLAGSPAIKKGILQTVKVVDELVKVMGRHKPENIVIEMAR |
| | | ENQTTQKGQKNSRERMKRIEEGIKELGSQILKEHPVENTQLQNEKLYLYYLQNGRDMYVDQELDINRLSDYDVDHIVPQSFLKDD |
| | | SIDNKVLTRSDKNRGKSDNVPSEEVVKKMKNYWRQLLNAKLITQRKFDNLTKAERGGLSELDKAGFIKRQLVETRQITKHVAQIL |
| | | DSRMNTKYDENDKLIREVKVITLKSKLVSDFRKDFQFYKVREINNYHHAHDAYLNAVVGTALIKKYPKLESEFVYGDYKVYDVRK |
| | | MIAKSEQEIGKATAKYFFYSNIMNFFKTEITLANGEIRKRPLIETNGETGEIVWDKGRDFATVRKVLSMPQVNIVKKTEVQTGGF |
| | | SKESILPKRNSDKLIARKKDWDPKKYGGFDSPTVAYSVLVVAKVEKGKSKKLKSVKELLGITIMERSSFEKNPIDELEAKGYKEV |
| | | KKDLIIKLPKYSLFELENGRKRMLASAGELQKGNELALPSKYVNFLYLASHYEKLKGSPEDNEQKQLFVEQHKHYLDEIIEQISE |
| | | FSKRVILADANLDKVLSAYNKHRDKPIREQAENIIHLFTLTNLGAPAAFKYEDTTIDRKRYTSTKEVLDATLIHQSITGLYETRI |
| | | DLSQLGGDGGGSPKKKRKV |
| Amino acid sequence | 810 | MDKKYSIGLDIGTNSVGWAVITDEYKVPSKKFKVLGNTDRHSIKKNLIGALLFDSGETAEATRLKRTARRRYTRRKNRICYLQEI |
| for Cas9 with Hibit | | FSNEMAKVDDSFFHRLEESFLVEEDKKHERHPIFGNIVDEVAYHEKYPTIYHLRKKLVDSTDKADLRLIYLALAHMIKFRGHFLI |
| tag | | EGDLNPDNSDVDKLFIQLVQTYNQLFEENPINASGVDAKAILSARLSKSRRLENLIAQLPGEKKNGLFGNLIALSLGLTPNFKSN |
| | | FDLAEDAKLQLSKDTYDDDLDNLLAQIGDQYADLFLAAKNLSDAILLSDILRVNTEITKAPLSASMIKRYDEHHQDLTLLKALVR |
| | | QQLPEKYKEIFFDQSKNGYAGYIDGGASQEEFYKFIKPILEKMDGTEELLVKLNREDLLRKQRTFDNGSIPHQIHLGELHAILRR |
| | | QEDFYPFLKDNREKIEKILTFRIPYYVGPLARGNSRFAWMTRKSEETITPWNFEEVVDKGASAQSFIERMTNFDKNLPNEKVLPK |
| | | HSLLYEYFTVYNELTKVKYVTEGMRKPAFLSGEQKKAIVDLLFKTNRKVTVKQLKEDYFKKIECFDSVEISGVEDRFNASLGTYH |
| | | DLLKIIKDKDFLDNEENEDILEDIVLTLTLFEDREMIEERLKTYAHLFDDKVMKQLKRRRYTGWGRLSRKLINGIRDKQSGKTIL |
| | | DFLKSDGFANRNFMQLIHDDSLTFKEDIQKAQVSGQGDSLHEHIANLAGSPAIKKGILQTVKVVDELVKVMGRHKPENIVIEMAR |
| | | ENQTTQKGQKNSRERMKRIEEGIKELGSQILKEHPVENTQLQNEKLYLYYLQNGRDMYVDQELDINRLSDYDVDHIVPQSFLKDD |
| | | SIDNKVLTRSDKNRGKSDNVPSEEVVKKMKNYWRQLLNAKLITQRKFDNLTKAERGGLSELDKAGFIKRQLVETRQITKHVAQIL |
| | | DSRMNTKYDENDKLIREVKVITLKSKLVSDFRKDFQFYKVREINNYHHAHDAYLNAVVGTALIKKYPKLESEFVYGDYKVYDVRK |
| | | MIAKSEQEIGKATAKYFFYSNIMNFFKTEITLANGEIRKRPLIETNGETGEIVWDKGRDFATVRKVLSMPQVNIVKKTEVQTGGF |
| | | SKESILPKRNSDKLIARKKDWDPKKYGGFDSPTVAYSVLVVAKVEKGKSKKLKSVKELLGITIMERSSFEKNPIDFLEAKGYKEV |
| | | KKDLIIKLPKYSLFELENGRKRMLASAGELQKGNELALPSKYVNFLYLASHYEKLKGSPEDNEQKQLFVEQHKHYLDEIIEQISE |
| | | FSKRVILADANLDKVLSAYNKHRDKPIREQAENIIHLFTLTNLGAPAAFKYEDTTIDRKRYTSTKEVLDATLIHQSITGLYETRI |
| | | DLSQLGGDGGGSPKKKRKVSESATPESVSGWRLFKKIS |
| Amino acid sequence | 811 | MEASPASGPRHLMDPHIFTSNFNNGIGRHKTYLCYEVERLDNGTSVKMDQHRGELHNQAKNLLCGFYGRHAELRFLDLVPSLQLD |
| for BC22n | | PAQIYRVTWFISWSPCFSWGCAGEVRAFLQENTHVRLRIFAARIYDYDPLYKEALQMLRDAGAQVSIMTYDEFKHCWDTFVDHQG |
| | | CPFQPWDGLDEHSQALSGRLRAILQNQGNSGSETPGTSESATPESDKKYSIGLAIGTNSVGWAVITDEYKVPSKKFKVLGNTDRH |
| | | SIKKNLIGALLFDSGETAEATRLKRTARRRYTRRKNRICYLQEIFSNEMAKVDDSFFHRLEESFLVEEDKKHERHPIFGNIVDEV |
| | | AYHEKYPTIYHLRKKLVDSTDKADLRLIYLALAHMIKERGHFLIEGDLNPDNSDVDKLFIQLVQTYNQLFEENPINASGVDAKAI |
| | | LSARLSKSRRLENLIAQLPGEKKNGLFGNLIALSLGLTPNEKSNEDLAEDAKLQLSKDTYDDDLDNLLAQIGDQYADLFLAAKNL |
| | | SDAILLSDILRVNTEITKAPLSASMIKRYDEHHQDLTLLKALVRQQLPEKYKEIFFDQSKNGYAGYIDGGASQEEFYKFIKPILE |
| | | KMDGTEELLVKLNREDLLRKQRTFDNGSIPHQIHLGELHAILRRQEDFYPFLKDNREKIEKILTFRIPYYVGPLARGNSRFAWMT |
| | | RKSEETITPWNFEEVVDKGASAQSFIERMTNEDKNLPNEKVLPKHSLLYEYFTVYNELTKVKYVTEGMRKPAFLSGEQKKAIVDL |
| | | LFKTNRKVTVKQLKEDYFKKIECFDSVEISGVEDRFNASLGTYHDLLKIIKDKDFLDNEENEDILEDIVLTLTLFEDREMIEERL |
| | | KTYAHLFDDKVMKQLKRRRYTGWGRLSRKLINGIRDKQSGKTILDFLKSDGFANRNEMQLIHDDSLTFKEDIQKAQVSGQGDSLH |
| | | EHIANLAGSPAIKKGILQTVKVVDELVKVMGRHKPENIVIEMARENQTTQKGQKNSRERMKRIEEGIKELGSQILKEHPVENTQL |
| | | QNEKLYLYYLQNGRDMYVDQELDINRLSDYDVDHIVPQSFLKDDSIDNKVLTRSDKNRGKSDNVPSEEVVKKMKNYWRQLLNAKL |
| | | ITQRKFDNLTKAERGGLSELDKAGFIKRQLVETRQITKHVAQILDSRMNTKYDENDKLIREVKVITLKSKLVSDFRKDFQFYKVR |
| | | EINNYHHAHDAYLNAVVGTALIKKYPKLESEFVYGDYKVYDVRKMIAKSEQEIGKATAKYFFYSNIMNFFKTEITLANGEIRKRP |
| | | LIETNGETGEIVWDKGRDFATVRKVLSMPQVNIVKKTEVQTGGFSKESILPKRNSDKLIARKKDWDPKKYGGEDSPTVAYSVLVV |
| | | AKVEKGKSKKLKSVKELLGITIMERSSFEKNPIDFLEAKGYKEVKKDLIIKLPKYSLFELENGRKRMLASAGELQKGNELALPSK |
| | | YVNFLYLASHYEKLKGSPEDNEQKQLFVEQHKHYLDEIIEQISEFSKRVILADANLDKVLSAYNKHRDKPIREQAENIIHLFTLT |
| | | NLGAPAAFKYFDTTIDRKRYTSTKEVLDATLIHQSITGLYETRIDLSQLGGDGGGSPKKKRKV* |
| Amino acid sequence | 812 | MEASPASGPRHLMDPHIFTSNFNNGIGRHKTYLCYEVERLDNGTSVKMDQHRGFLHNQAKNLLCGFYGRHAELRFLDLVPSLQLD |
| for BC22n with Hibit | | PAQIYRVTWFISWSPCFSWGCAGEVRAFLQENTHVRLRIFAARIYDYDPLYKEALQMLRDAGAQVSIMTYDEFKHCWDTFVDHQG |
| tag | | CPFQPWDGLDEHSQALSGRLRAILQNQGNSGSETPGTSESATPESDKKYSIGLAIGTNSVGWAVITDEYKVPSKKEKVLGNTDRH |
| | | SIKKNLIGALLFDSGETAEATRLKRTARRRYTRRKNRICYLQEIFSNEMAKVDDSFFHRLEESELVEEDKKHERHPIFGNIVDEV |
| | | AYHEKYPTIYHLRKKLVDSTDKADLRLIYLALAHMIKFRGHFLIEGDLNPDNSDVDKLFIQLVQTYNQLFEENPINASGVDAKAI |
| | | LSARLSKSRRLENLIAQLPGEKKNGLFGNLIALSLGLTPNFKSNEDLAEDAKLQLSKDTYDDDLDNLLAQIGDQYADLFLAAKNL |
| | | SDAILLSDILRVNTEITKAPLSASMIKRYDEHHQDLTLLKALVRQQLPEKYKEIFFDQSKNGYAGYIDGGASQEEFYKFIKPILE |
| | | KMDGTEELLVKLNREDLLRKQRTEDNGSIPHQIHLGELHAILRRQEDFYPELKDNREKIEKILTFRIPYYVGPLARGNSRFAWMT |
| | | RKSEETITPWNFEEVVDKGASAQSFIERMTNEDKNLPNEKVLPKHSLLYEYFTVYNELTKVKYVTEGMRKPAFLSGEQKKAIVDL |
| | | LFKTNRKVTVKQLKEDYFKKIECFDSVEISGVEDRFNASLGTYHDLLKIIKDKDFLDNEENEDILEDIVLTLTLFEDREMIEERL |
| | | KTYAHLEDDKVMKQLKRRRYTGWGRLSRKLINGIRDKQSGKTILDFLKSDGFANRNFMQLIHDDSLTFKEDIQKAQVSGQGDSLH |
| | | EHIANLAGSPAIKKGILQTVKVVDELVKVMGRHKPENIVIEMARENQTTQKGQKNSRERMKRIEEGIKELGSQILKEHPVENTQL |
| | | QNEKLYLYYLQNGRDMYVDQELDINRLSDYDVDHIVPQSFLKDDSIDNKVLTRSDKNRGKSDNVPSEEVVKKMKNYWRQLLNAKL |
| | | ITQRKFDNLTKAERGGLSELDKAGFIKRQLVETRQITKHVAQILDSRMNTKYDENDKLIREVKVITLKSKLVSDFRKDFQFYKVR |
| | | EINNYHHAHDAYLNAVVGTALIKKYPKLESEFVYGDYKVYDVRKMIAKSEQEIGKATAKYFFYSNIMNFFKTEITLANGEIRKRP |
| | | LIETNGETGEIVWDKGRDFATVRKVLSMPQVNIVKKTEVQTGGFSKESILPKRNSDKLIARKKDWDPKKYGGEDSPTVAYSVLVV |
| | | AKVEKGKSKKLKSVKELLGITIMERSSFEKNPIDFLEAKGYKEVKKDLIIKLPKYSLFELENGRKRMLASAGELQKGNELALPSK |
| | | YVNFLYLASHYEKLKGSPEDNEQKQLFVEQHKHYLDEIIEQISEFSKRVILADANLDKVLSAYNKHRDKPIREQAENIIHLETLT |
| | | NLGAPAAFKYFDTTIDRKRYTSTKEVLDATLIHQSITGLYETRIDLSQLGGDGGGSPKKKRKVSESATPESVSGWRLFKKIS |
| | 813 | Not used |
| Amino acid sequence | 814 | MTNLSDIIEKETGKQLVIQESILMLPEEVEEVIGNKPESDILVHTAYDESTDENVMLLTSDAPEYKPWALVIQDSNGENKIKMLS |
| for UGI | | GGSKRTADGSEFESPKKKRKVE |
| | 815-816 | Not used |
| Open reading frame | 817 | AUGGACAAGAAGUACAGCAUCGGACUGGACAUCGGAACAAACAGCGUCGGAUGGGCAGUCAUCACAGACGAAUACAAGGUCCCGA |
| for Cas9 | | GCAAGAAGUUCAAGGUCCUGGGAAACACAGACAGACACAGCAUCAAGAAGAACCUGAUCGGAGCACUGCUGUUCGACAGCGGAGA |
| | | AACAGCAGAAGCAACAAGACUGAAGAGAACAGCAAGAAGAAGAUACACAAGAAGAAAGAACAGAAUCUGCUACCUGCAGGAAAUC |
| | | UUCAGCAACGAAAUGGCAAAGGUCGACGACAGCUUCUUCCACAGACUGGAAGAAAGCUUCCUGGUCGAAGAAGACAAGAAGCACG |
| | | AAAGACACCCGAUCUUCGGAAACAUCGUCGACGAAGUCGCAUACCACGAAAAGUACCCGACAAUCUACCACCUGAGAAAGAAGCU |
| | | GGUCGACAGCACAGACAAGGCAGACCUGAGACUGAUCUACCUGGCACUGGCACACAUGAUCAAGUUCAGAGGACACUUCCUGAUC |
| | | GAAGGAGACCUGAACCCGGACAACAGCGACGUCGACAAGCUGUUCAUCCAGCUGGUCCAGACAUACAACCAGCUGUUCGAAGAAA |
| | | ACCCGAUCAACGCAAGCGGAGUCGACGCAAAGGCAAUCCUGAGCGCAAGACUGAGCAAGAGCAGAAGACUGGAAAACCUGAUCGC |
| | | ACAGCUGCCGGGAGAAAAGAAGAACGGACUGUUCGGAAACCUGAUCGCACUGAGCCUGGGACUGACACCGAACUUCAAGAGCAAC |
| | | UUCGACCUGGCAGAAGACGCAAAGCUGCAGCUGAGCAAGGACACAUACGACGACGACCUGGACAACCUGCUGGCACAGAUCGGAG |
| | | ACCAGUACGCAGACCUGUUCCUGGCAGCAAAGAACCUGAGCGACGCAAUCCUGCUGAGCGACAUCCUGAGAGUCAACACAGAAAU |
| | | CACAAAGGCACCGCUGAGCGCAAGCAUGAUCAAGAGAUACGACGAACACCACCAGGACCUGACACUGCUGAAGGCACUGGUCAGA |
| | | CAGCAGCUGCCGGAAAAGUACAAGGAAAUCUUCUUCGACCAGAGCAAGAACGGAUACGCAGGAUACAUCGACGGAGGAGCAAGCC |
| | | AGGAAGAAUUCUACAAGUUCAUCAAGCCGAUCCUGGAAAAGAUGGACGGAACAGAAGAACUGCUGGUCAAGCUGAACAGAGAAGA |
| | | CCUGCUGAGAAAGCAGAGAACAUUCGACAACGGAAGCAUCCCGCACCAGAUCCACCUGGGAGAACUGCACGCAAUCCUGAGAAGA |
| | | CAGGAAGACUUCUACCCGUUCCUGAAGGACAACAGAGAAAAGAUCGAAAAGAUCCUGACAUUCAGAAUCCCGUACUACGUCGGAC |
| | | CGCUGGCAAGAGGAAACAGCAGAUUCGCAUGGAUGACAAGAAAGAGCGAAGAAACAAUCACACCGUGGAACUUCGAAGAAGUCGU |
| | | CGACAAGGGAGCAAGCGCACAGAGCUUCAUCGAAAGAAUGACAAACUUCGACAAGAACCUGCCGAACGAAAAGGUCCUGCCGAAG |
| | | CACAGCCUGCUGUACGAAUACUUCACAGUCUACAACGAACUGACAAAGGUCAAGUACGUCACAGAAGGAAUGAGAAAGCCGGCAU |
| | | UCCUGAGCGGAGAACAGAAGAAGGCAAUCGUCGACCUGCUGUUCAAGACAAACAGAAAGGUCACAGUCAAGCAGCUGAAGGAAGA |
| | | CUACUUCAAGAAGAUCGAAUGCUUCGACAGCGUCGAAAUCAGCGGAGUCGAAGACAGAUUCAACGCAAGCCUGGGAACAUACCAC |
| | | GACCUGCUGAAGAUCAUCAAGGACAAGGACUUCCUGGACAACGAAGAAAACGAAGACAUCCUGGAAGACAUCGUCCUGACACUGA |
| | | CACUGUUCGAAGACAGAGAAAUGAUCGAAGAAAGACUGAAGACAUACGCACACCUGUUCGACGACAAGGUCAUGAAGCAGCUGAA |
| | | GAGAAGAAGAUACACAGGAUGGGGAAGACUGAGCAGAAAGCUGAUCAACGGAAUCAGAGACAAGCAGAGCGGAAAGACAAUCCUG |
| | | GACUUCCUGAAGAGCGACGGAUUCGCAAACAGAAACUUCAUGCAGCUGAUCCACGACGACAGCCUGACAUUCAAGGAAGACAUCC |
| | | AGAAGGCACAGGUCAGCGGACAGGGAGACAGCCUGCACGAACACAUCGCAAACCUGGCAGGAAGCCCGGCAAUCAAGAAGGGAAU |
| | | CCUGCAGACAGUCAAGGUCGUCGACGAACUGGUCAAGGUCAUGGGAAGACACAAGCCGGAAAACAUCGUCAUCGAAAUGGCAAGA |
| | | GAAAACCAGACAACACAGAAGGGACAGAAGAACAGCAGAGAAAGAAUGAAGAGAAUCGAAGAAGGAAUCAAGGAACUGGGAAGCC |
| | | AGAUCCUGAAGGAACACCCGGUCGAAAACACACAGCUGCAGAACGAAAAGCUGUACCUGUACUACCUGCAGAACGGAAGAGACAU |
| | | GUACGUCGACCAGGAACUGGACAUCAACAGACUGAGCGACUACGACGUCGACCACAUCGUCCCGCAGAGCUUCCUGAAGGACGAC |
| | | AGCAUCGACAACAAGGUCCUGACAAGAAGCGACAAGAACAGAGGAAAGAGCGACAACGUCCCGAGCGAAGAAGUCGUCAAGAAGA |
| | | UGAAGAACUACUGGAGACAGCUGCUGAACGCAAAGCUGAUCACACAGAGAAAGUUCGACAACCUGACAAAGGCAGAGAGAGGAGG |
| | | ACUGAGCGAACUGGACAAGGCAGGAUUCAUCAAGAGACAGCUGGUCGAAACAAGACAGAUCACAAAGCACGUCGCACAGAUCCUG |
| | | GACAGCAGAAUGAACACAAAGUACGACGAAAACGACAAGCUGAUCAGAGAAGUCAAGGUCAUCACACUGAAGAGCAAGCUG |
| | | GUCAGCGACUUCAGAAAGGACUUCCAGUUCUACAAGGUCAGAGAAAUCAACAACUACCACCACGCACACGACGCAUACCUGAACG |
| | | CAGUCGUCGGAACAGCACUGAUCAAGAAGUACCCGAAGCUGGAAAGCGAAUUCGUCUACGGAGACUACAAGGUCUACGACGUCAG |
| | | AAAGAUGAUCGCAAAGAGCGAACAGGAAAUCGGAAAGGCAACAGCAAAGUACUUCUUCUACAGCAACAUCAUGAACUUCUUCAAG |
| | | ACAGAAAUCACACUGGCAAACGGAGAAAUCAGAAAGAGACCGCUGAUCGAAACAAACGGAGAAACAGGAGAAAUCGUCUGGGACA |
| | | AGGGAAGAGACUUCGCAACAGUCAGAAAGGUCCUGAGCAUGCCGCAGGUCAACAUCGUCAAGAAGACAGAAGUCCAGACAGGAGG |
| | | AUUCAGCAAGGAAAGCAUCCUGCCGAAGAGAAACAGCGACAAGCUGAUCGCAAGAAAGAAGGACUGGGACCCGAAGAAGUACGGA |
| | | GGAUUCGACAGCCCGACAGUCGCAUACAGCGUCCUGGUCGUCGCAAAGGUCGAAAAGGGAAAGAGCAAGAAGCUGAAGAGCGUCA |
| | | AGGAACUGCUGGGAAUCACAAUCAUGGAAAGAAGCAGCUUCGAAAAGAACCCGAUCGACUUCCUGGAAGCAAAGGGAUACAAGGA |
| | | AGUCAAGAAGGACCUGAUCAUCAAGCUGCCGAAGUACAGCCUGUUCGAACUGGAAAACGGAAGAAAGAGAAUGCUGGCAAGCGCA |
| | | GGAGAACUGCAGAAGGGAAACGAACUGGCACUGCCGAGCAAGUACGUCAACUUCCUGUACCUGGCAAGCCACUACGAAAAGCUGA |
| | | AGGGAAGCCCGGAAGACAACGAACAGAAGCAGCUGUUCGUCGAACAGCACAAGCACUACCUGGACGAAAUCAUCGAACAGAUCAG |
| | | CGAAUUCAGCAAGAGAGUCAUCCUGGCAGACGCAAACCUGGACAAGGUCCUGAGCGCAUACAACAAGCACAGAGACAAGCCGAUC |
| | | AGAGAACAGGCAGAAAACAUCAUCCACCUGUUCACACUGACAAACCUGGGAGCACCGGCAGCAUUCAAGUACUUCGACACAACAA |
| | | UCGACAGAAAGAGAUACACAAGCACAAAGGAAGUCCUGGACGCAACACUGAUCCACCAGAGCAUCACAGGACUGUACGAAACAAG |
| | | AAUCGACCUGAGCCAGCUGGGAGGAGACGGAGGAGGAAGCCCGAAGAAGAAGAGAAAGGUCUAG |
| Open reading frame | 818 | AUGGAAGCAAGCCCGGCAAGCGGACCGAGACACCUGAUGGACCCGCACAUCUUCACAAGCAACUUCAACAACGGAAUCGGAAGAC |
| for BC22 | | ACAAGACAUACCUGUGCUACGAAGUCGAAAGACUGGACAACGGAACAAGCGUCAAGAUGGACCAGCACAGAGGAUUCCUGCACAA |
| | | CCAGGCAAAGAACCUGCUGUGCGGAUUCUACGGAAGACACGCAGAACUGAGAUUCCUGGACCUGGUCCCGAGCCUGCAGCUGGAC |
| | | CCGGCACAGAUCUACAGAGUCACAUGGUUCAUCAGCUGGAGCCCGUGCUUCAGCUGGGGAUGCGCAGGAGAAGUCAGAGCAUUUC |
| | | UGCAGGAAAACACACACGUCAGACUGAGAAUCUUCGCAGCAAGAAUCUAC |
| | | GACUACGACCCGCUGUACAAGGAAGCACUGCAGAUGCUGAGAGACGCAGGAGCACAGGUCAGCAUCAUGACAUACGACGAAUUCA |
| | | AGCACUGCUGGGACACAUUCGUCGACCACCAGGGAUGCCCGUUCCAGCCGUGGGACGGACUGGACGAACACAGCCAGGCACUGAG |
| | | CGGAAGACUGAGAGCAAUCCUGCAGAACCAGGGAAACAGCGGAAGCGAAACACCGGGAACAAGCGAAAGCGCAACACCGGAAAGC |
| | | GACAAGAAGUACAGCAUCGGACUGGCCAUCGGAACAAACAGCGUCGGAUGGGCAGUCAUCACAGACGAAUACAAGGUCCCGAGCA |
| | | AGAAGUUCAAGGUCCUGGGAAACACAGACAGACACAGCAUCAAGAAGAACCUGAUCGGAGCACUGCUGUUCGACAGCGGAGAAAC |
| | | AGCAGAAGCAACAAGACUGAAGAGAACAGCAAGAAGAAGAUACACAAGAAGAAAGAACAGAAUCUGCUACCUGCAGGAAAUCUUC |
| | | AGCAACGAAAUGGCAAAGGUCGACGACAGCUUCUUCCACAGACUGGAAGAAAGCUUCCUGGUCGAAGAAGACAAGAAGCACGAAA |
| | | GACACCCGAUCUUCGGAAACAUCGUCGACGAAGUCGCAUACCACGAAAAGUACCCGACAAUCUACCACCUGAGAAAGAAGCUGGU |
| | | CGACAGCACAGACAAGGCAGACCUGAGACUGAUCUACCUGGCACUGGCACACAUGAUCAAGUUCAGAGGACACUUCCUGAUCGAA |
| | | GGAGACCUGAACCCGGACAACAGCGACGUCGACAAGCUGUUCAUCCAGCUGGUCCAGACAUACAACCAGCUGUUCGAAGAAAACC |
| | | CGAUCAACGCAAGCGGAGUCGACGCAAAGGCAAUCCUGAGCGCAAGACUGAGCAAGAGCAGAAGACUGGAAAACCUGAUCGCACA |
| | | GCUGCCGGGAGAAAAGAAGAACGGACUGUUCGGAAACCUGAUCGCACUGAGCCUGGGACUGACACCGAACUUCAAGAGCAACUUC |
| | | GACCUGGCAGAAGACGCAAAGCUGCAGCUGAGCAAGGACACAUACGACGACGACCUGGACAACCUGCUGGCACAGAUCGGAGACC |
| | | AGUACGCAGACCUGUUCCUGGCAGCAAAGAACCUGAGCGACGCAAUCCUGCUGAGCGACAUCCUGAGAGUCAACACAGAAAUCAC |
| | | AAAGGCACCGCUGAGCGCAAGCAUGAUCAAGAGAUACGACGAACACCACCAGGACCUGACACUGCUGAAGGCACUGGUCAGACAG |
| | | CAGCUGCCGGAAAAGUACAAGGAAAUCUUCUUCGACCAGAGCAAGAACGGAUACGCAGGAUACAUCGACGGAGGAGCAAGCCAGG |
| | | AAGAAUUCUACAAGUUCAUCAAGCCGAUCCUGGAAAAGAUGGACGGAACAGAAGAACUGCUGGUCAAGCUGAACAGAGAAGACCU |
| | | GCUGAGAAAGCAGAGAACAUUCGACAACGGAAGCAUCCCGCACCAGAUCCACCUGGGAGAACUGCACGCAAUCCUGAGAAGACAG |
| | | GAAGACUUCUACCCGUUCCUGAAGGACAACAGAGAAAAGAUCGAAAAGAUCCUGACAUUCAGAAUCCCGUACUACGUCGGACCGC |
| | | UGGCAAGAGGAAACAGCAGAUUCGCAUGGAUGACAAGAAAGAGCGAAGAAACAAUCACACCGUGGAACUUCGAAGAAGUCGUCGA |
| | | CAAGGGAGCAAGCGCACAGAGCUUCAUCGAAAGAAUGACAAACUUCGACAAGAACCUGCCGAACGAAAAGGUCCUGCCGAAGCAC |
| | | AGCCUGCUGUACGAAUACUUCACAGUCUACAACGAACUGACAAAGGUCAAGUACGUCACAGAAGGAAUGAGAAAGCCGGCAUUCC |
| | | UGAGCGGAGAACAGAAGAAGGCAAUCGUCGACCUGCUGUUCAAGACAAACAGAAAGGUCACAGUCAAGCAGCUGAAGGAAGACUA |
| | | CUUCAAGAAGAUCGAAUGCUUCGACAGCGUCGAAAUCAGCGGAGUCGAAGACAGAUUCAACGCAAGCCUGGGAACAUACCACGAC |
| | | CUGCUGAAGAUCAUCAAGGACAAGGACUUCCUGGACAACGAAGAAAACGAAGACAUCCUGGAAGACAUCGUCCUGACACUGACAC |
| | | UGUUCGAAGACAGAGAAAUGAUCGAAGAAAGACUGAAGACAUACGCACACCUGUUCGACGACAAGGUCAUGAAGCAGCUGAAGAG |
| | | AAGAAGAUACACAGGAUGGGGAAGACUGAGCAGAAAGCUGAUCAACGGAAUCAGAGACAAGCAGAGCGGAAAGACAAUCCUGGAC |
| | | UUCCUGAAGAGCGACGGAUUCGCAAACAGAAACUUCAUGCAGCUGAUCCACGACGACAGCCUGACAUUCAAGGAAGACAUCCAGA |
| | | AGGCACAGGUCAGCGGACAGGGAGACAGCCUGCACGAACACAUCGCAAACCUGGCAGGAAGCCCGGCAAUCAAGAAGGGAAUCCU |
| | | GCAGACAGUCAAGGUCGUCGACGAACUGGUCAAGGUCAUGGGAAGACACAAGCCGGAAAACAUCGUCAUCGAAAUGGCAAGAGAA |
| | | AACCAGACAACACAGAAGGGACAGAAGAACAGCAGAGAAAGAAUGAAGAGAAUCGAAGAAGGAAUCAAGGAACUGGGAAGCCAGA |
| | | UCCUGAAGGAACACCCGGUCGAAAACACACAGCUGCAGAACGAAAAGCUGUACCUGUACUACCUGCAGAACGGAAGAGACAUGUA |
| | | CGUCGACCAGGAACUGGACAUCAACAGACUGAGCGACUACGACGUCGACCACAUCGUCCCGCAGAGCUUCCUGAAGGACGACAGC |
| | | AUC |
| | | GACAACAAGGUCCUGACAAGAAGCGACAAGAACAGAGGAAAGAGCGACAACGUCCCGAGCGAAGAAGUCGUCAAGAAGAUGAAGA |
| | | ACUACUGGAGACAGCUGCUGAACGCAAAGCUGAUCACACAGAGAAAGUUCGACAACCUGACAAAGGCAGAGAGAGGAGGACUGAG |
| | | CGAACUGGACAAGGCAGGAUUCAUCAAGAGACAGCUGGUCGAAACAAGACAGAUCACAAAGCACGUCGCACAGAUCCUGGACAGC |
| | | AGAAUGAACACAAAGUACGACGAAAACGACAAGCUGAUCAGAGAAGUCAAGGUCAUCACACUGAAGAGCAAGCUGGUCAGCGACU |
| | | UCAGAAAGGACUUCCAGUUCUACAAGGUCAGAGAAAUCAACAACUACCACCACGCACACGACGCAUACCUGAACGCAGUCGUCGG |
| | | AACAGCACUGAUCAAGAAGUACCCGAAGCUGGAAAGCGAAUUCGUCUACGGAGACUACAAGGUCUACGACGUCAGAAAGAUGAUC |
| | | GCAAAGAGCGAACAGGAAAUCGGAAAGGCAACAGCAAAGUACUUCUUCUACAGCAACAUCAUGAACUUCUUCAAGACAGAAAUCA |
| | | CACUGGCAAACGGAGAAAUCAGAAAGAGACCGCUGAUCGAAACAAACGGAGAAACAGGAGAAAUCGUCUGGGACAAGGGAAGAGA |
| | | CUUCGCAACAGUCAGAAAGGUCCUGAGCAUGCCGCAGGUCAACAUCGUCAAGAAGACAGAAGUCCAGACAGGAGGAUUCAGCAAG |
| | | GAAAGCAUCCUGCCGAAGAGAAACAGCGACAAGCUGAUCGCAAGAAAGAAGGACUGGGACCCGAAGAAGUACGGAGGAUUCGACA |
| | | GCCCGACAGUCGCAUACAGCGUCCUGGUCGUCGCAAAGGUCGAAAAGGGAAAGAGCAAGAAGCUGAAGAGCGUCAAGGAACUGCU |
| | | GGGAAUCACAAUCAUGGAAAGAAGCAGCUUCGAAAAGAACCCGAUCGACUUCCUGGAAGCAAAGGGAUACAAGGAAGUCAAGAAG |
| | | GACCUGAUCAUCAAGCUGCCGAAGUACAGCCUGUUCGAACUGGAAAACGGAAGAAAGAGAAUGCUGGCAAGCGCAGGAGAACUGC |
| | | AGAAGGGAAACGAACUGGCACUGCCGAGCAAGUACGUCAACUUCCUGUACCUGGCAAGCCACUACGAAAAGCUGAAGGGAAGCCC |
| | | GGAAGACAACGAACAGAAGCAGCUGUUCGUCGAACAGCACAAGCACUACCUGGACGAAAUCAUCGAACAGAUCAGCGAAUUCAGC |
| | | AAGAGAGUCAUCCUGGCAGACGCAAACCUGGACAAGGUCCUGAGCGCAUACAACAAGCACAGAGACAAGCCGAUCAGAGAACAGG |
| | | CAGAAAACAUCAUCCACCUGUUCACACUGACAAACCUGGGAGCACCGGCAGCAUUCAAGUACUUCGACACAACAAUCGACAGAAA |
| | | GAGAUACACAAGCACAAAGGAAGUCCUGGACGCAACACUGAUCCACCAGAGCAUCACAGGACUGUACGAAACAAGAAUCGAUCUG |
| | | AGCCAGCUGGGAGGAGACAGCGGAGGAAGCACAAACCUGAGCGACAUCAUCGAAAAGGAAACAGGAAAGCAGCUGGUCAUCCAGG |
| | | AAAGCAUCCUGAUGCUGCCGGAAGAAGUCGAAGAAGUCAUCGGAAACAAGCCGGAAAGCGACAUCCUGGUCCACACAGCAUACGA |
| | | CGAAAGCACAGACGAAAACGUCAUGCUGCUGACAAGCGACGCACCGGAAUACAAGCCGUGGGCACUGGUCAUCCAGGACAGCAAC |
| | | GGAGAAAACAAGAUCAAGAUGCUGAGCGGAGGAAGCCCGAAGAAGAAGAGAAAGGUCUAA |
| Open reading frame | 819 | AUGGGACCGAAGAAGAAGAGAAAGGUCGGAGGAGGAAGCACAAACCUGUCGGACAUCAUCGAAAAGGAAACAGGAAAGCAGCUGG |
| for UGI | | UCAUCCAGGAAUCGAUCCUGAUGCUGCCGGAAGAAGUCGAAGAAGUCAUCGGAAACAAGCCGGAAUCGGACAUCCUGGUCCACAC |
| | | AGCAUACGACGAAUCGACAGACGAAAACGUCAUGCUGCUGACAUCGGACGCACCGGAAUACAAGCCGUGGGCACUGGUCAUCCAG |
| | | GACUCGAACGGAGAAAACAAGAUCAAGAUGCUGUGA |
| mRNA encoding UGI | 821 | GGGAAGCUCAGAAUAAACGCUCAACUUUGGCCGGAUCUGCCACCAUGACCAACCUGUCCGACAUCAUCGAGAAGGAGACCGGCAA |
| | | GCAGCUGGUGAUCCAGGAGUCCAUCCUGAUGCUGCCCGAGGAGGUGGAGGAGGUGAUCGGCAACAAGCCCGAGUCCGACAUCCUG |
| | | GUGCACACCGCCUACGACGAGUCCACCGACGAGAACGUGAUGCUGCUGACCUCCGACGCCCCCGAGUACAAGCCCUGGGCCCUGG |
| | | UGAUCCAGGACUCCAACGGCGAGAACAAGAUCAAGAUGCUGUCCGGCGGCUCCAAGCGGACCGCCGACGGCUCCGAGUUCGAGUC |
| | | CCCCAAGAAGAAGCGGAAGGUGGAGUGAUAGCUAGCACCAGCCUCAAGAACACCCGAAUGGAGUCUCUAAGCUACAUAAUACCAA |
| | | CUUACACUUUACAAAAUGUUGUCCCCCAAAAUGUAGCCAUUCGUAUCUGCUCCUAAUAAAAAGAAAGUUUCUUCACAUUCUCUCG |
| | | AGAAAAAAAAAAAAUGGAAAAAAAAAAAACGGAAAAAAAAAAAAGGUAAAAAAAAAAAAUAUAAAAAAAAAAAACAUAAAAAAAA |
| | | AAAACGAAAAAAAAAAAACGUAAAAAAAAAAAACUCAAAAAAAAAAAAGAUAAAAAAAAAAAACCUAAAAAAAAAAAAUGUAAAA |
| | | AAAAAAAAGGGAAAAAAAAAAAACGCAAAAAAAAAAAACACAAAAAAAAAAAAUGCAAAAAAAAAAAAUCGAAAAAAAAAAAAUC |
| | | UAAAAAAAAAAAACGAAAAAAAAAAAACCCAAAAAAAAAAAAGACAAAAAAAAAAAAUAGAAAAAAAAAAAAGUUAAAAAAAAAA |
| | | AACUGAAAAAAAAAAAAUUUAAAAAAAAAAAAUCUAG |
| mRNA encoding | 822 | GGGAAGCUCAGAAUAAACGCUCAACUUUGGCCGGAUCUGCCACCAUGGACGGCUCCGGCGGCGGCUCCCCCAAGAAGAAGCGGAA |
| Nme2Cas9 base editor | | GGUGGAGGACAAGCGGCCCGCCGCCACCAAGAAGGCCGGCCAGGCCAAGAAGAAGAAGGGCGGCUCCGGCGGCGGCGAGGCCUCC |
| | | CCCGCCUCCGGCCCCCGGCACCUGAUGGACCCCCACAUCUUCACCUCCAACUUCAACAACGGCAUCGGCCGGCACAAGACCUACC |
| | | UGUGCUACGAGGUGGAGCGGCUGGACAACGGCACCUCCGUGAAGAUGGACCAGCACCGGGGCUUCCUGCACAACCAGGCCAAGAA |
| | | CCUGCUGUGCGGCUUCUACGGCCGGCACGCCGAGCUGCGGUUCCUGGACCUGGUGCCCUCCCUGCAGCUGGACCCCGCCCAGAUC |
| | | UACCGGGUGACCUGGUUCAUCUCCUGGUCCCCCUGCUUCUCCUGGGGCUGCGCCGGCGAGGUGCGGGCCUUCCUGCAGGAGAACA |
| | | CCCACGUGCGGCUGCGGAUCUUCGCCGCCCGGAUCUACGACUACGACCCCCUGUACAAGGAGGCCCUGCAGAUGCUGCGGGACGC |
| | | CGGCGCCCAGGUGUCCAUCAUGACCUACGACGAGUUCAAGCACUGCUGGGACACCUUCGUGGACCACCAGGGCUGCCCCUUCCAG |
| | | CCCUGGGACGGCCUGGACGAGCACUCCCAGGCCCUGUCCGGCCGGCUGCGGGCCAUCCUGCAGAACCAGGGCAACUCCGGCUCCG |
| | | AGACCCCCGGCACCUCCGAGUCCGCCACCCCCGAGUCCGCAGCGUUCAAACCAAAUCCCAUCAACUACAUCCUGGGCCUGGCCAU |
| | | CGGCAUCGCCUCCGUGGGCUGGGCCAUGGUGGAGAUCGACGAGGAGGAGAACCCCAUCCGGCUGAUCGACCUGGGCGUGCGGGUG |
| | | UUCGAGCGGGCCGAGGUGCCCAAGACCGGCGACUCCCUGGCCAUGGCCCGGCGGCUGGCCCGGUCCGUGCGGCGGCUGACCCGGC |
| | | GGCGGGCCCACCGGCUGCUGCGGGCCCGGCGGCUGCUGAAGCGGGAGGGCGUGCUGCAGGCCGCCGACUUCGACGAGAACGGCCU |
| | | GAUCAAGUCCCUGCCCAACACCCCCUGGCAGCUGCGGGCCGCCGCCCUGGACCGGAAGCUGACCCCCCUGGAGUGGUCCGCCGUG |
| | | CUGCUGCACCUGAUCAAGCACCGGGGCUACCUGUCCCAGCGGAAGAACGAGGGCGAGACCGCCGACAAGGAGCUGGGCGCCCUGC |
| | | UGAAGGGCGUGGCCAACAACGCCCACGCCCUGCAGACCGGCGACUUCCGGACCCCCGCCGAGCUGGCCCUGAACAAGUUCGAGAA |
| | | GGAGUCCGGCCACAUCCGGAACCAGCGGGGCGACUACUCCCACACCUUCUCCCGGAAGGACCUGCAGGCCGAGCUGAUCCUGCUG |
| | | UUCGAGAAGCAGAAGGAGUUCGGCAACCCCCACGUGUCCGGCGGCCUGAAGGAGGGCAUCGAGACCCUGCUGAUGACCCAGCGGC |
| | | CCGCCCUGUCCGGCGACGCCGUGCAGAAGAUGCUGGGCCACUGCACCUUCGAGCCCGCCGAGCCCAAGGCCGCCAAGAACACCUA |
| | | CACCGCCGAGCGGUUCAUCUGGCUGACCAAGCUGAACAACCUGCGGAUCCUGGAGCAGGGCUCCGAGCGGCCCCUGACCGACACC |
| | | GAGCGGGCCACCCUGAUGGACGAGCCCUACCGGAAGUCCAAGCUGACCUACGCCCAGGCCCGGAAGCUGCUGGGCCUGGAGGACA |
| | | CCGCCUUCUUCAAGGGCCUGCGGUACGGCAAGGACAACGCCGAGGCCUCCACCCUGAUGGAGAUGAAGGCCUACCACGCCAUCUC |
| | | CCGGGCCCUGGAGAAGGAGGGCCUGAAGGACAAGAAGUCCCCCCUGAACCUGUCCUCCGAGCUGCAGGACGAGAUCGGCACCGCC |
| | | UUCUCCCUGUUCAAGACCGACGAGGACAUCACCGGCCGGCUGAAGGACCGGGUGCAGCCCGAGAUCCUGGAGGCCCUGCUGAAGC |
| | | ACAUCUCCUUCGACAAGUUCGUGCAGAUCUCCCUGAAGGCCCUGCGGCGGAUCGUGCCCCUGAUGGAGCAGGGCAAGCGGUACGA |
| | | CGAGGCCUGCGCCGAGAUCUACGGCGACCACUACGGCAAGAAGAACACCGAGGAGAAGAUCUACCUGCCCCCCAUCCCCGCCGAC |
| | | GAGAUCCGGAACCCCGUGGUGCUGCGGGCCCUGUCCCAGGCCCGGAAGGUGAUCAACGGCGUGGUGCGGCGGUACGGCUCCCCCG |
| | | CCCGGAUCCACAUCGAGACCGCCCGGGAGGUGGGCAAGUCCUUCAAGGACCGGAAGGAGAUCGAGAAGCGGCAGGAGGAGAACCG |
| | | GAAGGACCGGGAGAAGGCCGCCGCCAAGUUCCGGGAGUACUUCCCCAACUUCGUGGGCGAGCCCAAGUCCAAGGACAUCCUGAAG |
| | | CUGCGGCUGUACGAGCAGCAGCACGGCAAGUGCCUGUACUCCGGCAAGGAGAUCAACCUGGUGCGGCUGAACGAGAAGGGCUACG |
| | | UGGAGAUCGACCACGCCCUGCCCUUCUCCCGGACCUGGGACGACUCCUUCAACAACAAGGUGCUGGUGCUGGGCUCCGAGAACCA |
| | | GAACAAGGGCAACCAGACCCCCUACGAGUACUUCAACGGCAAGGACAACUCCCGGGAGUGGCAGGAGUUCAAGGCCCGGGUGGAG |
| | | ACCUCCCGGUUCCCCCGGUCCAAGAAGCAGCGGAUCCUGCUGCAGAAGUUCGACGAGGACGGCUUCAAGGAGUGCAACCUGAACG |
| | | ACACCCGGUACGUGAACCGCUUCCUGUGCCAGUUCGUGGCCGACCACAUCCUGCUGACCGGCAAGGGCAAGCGGCGGGUGUUCGC |
| | | CUCCAACGGCCAGAUCACCAACCUGCUGCGGGGCUUCUGGGGCCUGCGGAAGGUGCGGGCCGAGAACGACCGGCACCACGCCCUG |
| | | GACGCCGUGGUGGUGGCCUGCUCCACCGUGGCCAUGCAGCAGAAGAUCACCCGGUUCGUGCGGUACAAGGAGAUGAACGCCUUCG |
| | | ACGGCAAGACCAUCGACAAGGAGACCGGCAAGGUGCUGCACCAGAAGACCCACUUCCCCCAGCCCUGGGAGUUCUUCGCCCAGGA |
| | | GGUGAUGAUCCGGGUGUUCGGCAAGCCCGACGGCAAGCCCGAGUUCGAGGAGGCCGACACCCCCGAGAAGCUGCGGACCCUGCUG |
| | | GCCGAGAAGCUGUCCUCCCGGCCCGAGGCCGUGCACGAGUACGUGACCCCCCUGUUCGUGUCCCGGGCCCCCAACCGGAAGAUGU |
| | | CCGGCGCCCACAAGGACACCCUGCGGUCCGCCAAGCGGUUCGUGAAGCACAACGAGAAGAUCUCCGUGAAGCGGGUGUGGCUGAC |
| | | CGAGAUCAAGCUGGCCGACCUGGAGAACAUGGUGAACUACAAGAACGGCCGGGAGAUCGAGCUGUACGAGGCCCUGAAGGCCCGG |
| | | CUGGAGGCCUACGGCGGCAACGCCAAGCAGGCCUUCGACCCCAAGGACAACCCCUUCUACAAGAAGGGCGGCCAGCUGGUGAAGG |
| | | CCGUGCGGGUGGAGAAGACCCAGGAGUCCGGCGUGCUGCUGAACAAGAAGAACGCCUACACCAUCGCCGACAACGGCGACAUGGU |
| | | GCGGGUGGACGUGUUCUGCAAGGUGGACAAGAAGGGCAAGAACCAGUACUUCAUCGUGCCCAUCUACGCCUGGCAGGUGGCCGAG |
| | | AACAUCCUGCCCGACAUCGACUGCAAGGGCUACCGGAUCGACGACUCCUACACCUUCUGCUUCUCCCUGCACAAGUACGACCUGA |
| | | UCGCCUUCCAGAAGGACGAGAAGUCCAAGGUGGAGUUCGCCUACUACAUCAACUGCGACUCCUCCAACGGCCGGUUCUACCUGGC |
| | | CUGGCACGACAAGGGCUCCAAGGAGCAGCAGUUCCGGAUCUCCACCCAGAACCUGGUGCUGAUCCAGAAGUACCAGGUGAACGAG |
| | | CUGGGCAAGGAGAUCCGGCCCUGCCGGCUGAAGAAGCGGCCCCCCGUGCGGUAGUGACUAGCACCAGCCUCAAGAACACCCGAAU |
| | | GGAGUCUCUAAGCUACAUAAUACCAACUUACACUUUACAAAAUGUUGUCCCCCAAAAUGUAGCCAUUCGUAUCUGCUCCUAAUAA |
| | | AAAGAAAGUUUCUUCACAUUCUCUCGAGAAAAAAAAAAAAUGGAAAAAAAAAAAACGGAAAAAAAAAAAGGUAAAAAAAAAAAAU |
| | | AUAAAAAAAAAAACAUAAAAAAAAAAAACGAAAAAAAAAAAACGUAAAAAAAAAAAACUCAAAAAAAAAAAGAUAAAAAAAAAAA |
| | | ACCUAAAAAAAAAAAAUGUAAAAAAAAAAAAGGGAAAAAAAAAAACGCAAAAAAAAAAAACACAAAAAAAAAAAAUGCAAAAAAA |
| | | AAAAAUCGAAAAAAAAAAAAUCUAAAAAAAAAAAACGAAAAAAAAAAAACCCAAAAAAAAAAAAGACAAAAAAAAAAAAUAGAAA |
| | | AAAAAAAAGUUAAAAAAAAAAAACUGAAAAAAAAAAAAUUUAAAAAAAAAAAAUCUAG |
| Open reading frame | 823 | ATGGCAGCATTCAAGCCGAACTCGATCAACTACATCCTGGGACTGGACATCGGAATCGCATCGGTCGGATGGGCAATGGTCGAAA |
| for NmelCas9 | | TCGACGAAGAAGAAAACCCGATCAGACTGATCGACCTGGGAGTCAGAGTCTTCGAAAGAGCAGAAGTCCCGAAGACAGGAGACTC |
| | | GCTGGCAATGGCAAGAAGACTGGCAAGATCGGTCAGAAGACTGACAAGAAGAAGAGCACACAGACTGCTGAGAACAAGAAGACTG |
| | | CTGAAGAGAGAAGGAGTCCTGCAGGCAGCAAACTTCGACGAAAACGGACTGATCAAGTCGCTGCCGAACACACCGTGGCAGCTGA |
| | | GAGCAGCAGCACTGGACAGAAAGCTGACACCGCTGGAATGGTCGGCAGTCCTGCTGCACCTGATCAAGCACAGAGGATACCTGTC |
| | | GCAGAGAAAGAACGAAGGAGAAACAGCAGACAAGGAACTGGGAGCACTGCTGAAGGGAGTCGCAGGAAACGCACACGCACTGCAG |
| | | ACAGGAGACTTCAGAACACCGGCAGAACTGGCACTGAACAAGTTCGAAAAGGAATCGGGACACATCAGAAACCAGAGATCGGACT |
| | | ACTCGCACACATTCTCGAGAAAGGACCTGCAGGCAGAACTGATCCTGCTGTTCGAAAAGCAGAAGGAATTCGGAAACCCGCACGT |
| | | CTCGGGAGGACTGAAGGAAGGAATCGAAACACTGCTGATGACACAGAGACCGGCACTGTCGGGAGACGCAGTCCAGAAGATGCTG |
| | | GGACACTGCACATTCGAACCGGCAGAACCGAAGGCAGCAAAGAACACATACACAGCAGAAAGATTCATCTGGCTGACAAAGCTGA |
| | | ACAACCTGAGAATCCTGGAACAGGGATCGGAAAGACCGCTGACAGACACAGAAAGAGCAACACTGATGGACGAACCGTACAGAAA |
| | | GTCGAAGCTGACATACGCACAGGCAAGAAAGCTGCTGGGACTGGAAGACACAGCATTCTTCAAGGGACTGAGATACGGAAAGGAC |
| | | AACGCAGAAGCATCGACACTGATGGAAATGAAGGCATACCACGCAATCTCGAGAGCACTGGAAAAGGAAGGACTGAAGGACAAGA |
| | | AGTCGCCGCTGAACCTGTCGCCGGAACTGCAGGACGAAATCGGAACAGCATTCTCGCTGTTCAAGACAGACGAAGACATCACAGG |
| | | AAGACTGAAGGACAGAATCCAGCCGGAAATCCTGGAAGCACTGCTGAAGCACATCTCGTTCGACAAGTTCGTCCAGATCTCGCTG |
| | | AAGGCACTGAGAAGAATCGTCCCGCTGATGGAACAGGGAAAGAGATACGACGAAGCATGCGCAGAAATCTACGGAGACCACTACG |
| | | GAAAGAAGAACACAGAAGAAAAGATCTACCTGCCGCCGATCCCGGCAGACGAAATCAGAAACCCGGTCGTCCTGAGAGCACTGTC |
| | | GCAGGCAAGAAAGGTCATCAACGGAGTCGTCAGAAGATACGGATCGCCGGCAAGAATCCACATCGAAACAGCAAGAGAAGTCGGA |
| | | AAGTCGTTCAAGGACAGAAAGGAAATCGAAAAGAGACAGGAAGAAAACAGAAAGGACAGAGAAAAGGCAGCAGCAAAGTTCAGAG |
| | | AATACTTCCCGAACTTCGTCGGAGAACCGAAGTCGAAGGACATCCTGAAGCTGAGACTGTACGAACAGCAGCACGGAAAGTGCCT |
| | | GTACTCGGGAAAGGAAATCAACCTGGGAAGACTGAACGAAAAGGGATACGTCGAAATCGACCACGCACTGCCGTTCTCGAGAACA |
| | | TGGGACGACTCGTTCAACAACAAGGTCCTGGTCCTGGGATCGGAAAACCAGAACAAGGGAAACCAGACACCGTACGAATACTTCA |
| | | ACGGAAAGGACAACTCGAGAGAATGGCAGGAATTCAAGGCAAGAGTCGAAACATCGAGATTCCCGAGATCGAAGAAGCAGAGAAT |
| | | CCTGCTGCAGAAGTTCGACGAAGACGGATTCAAGGAAAGAAACCTGAACGACACAAGATACGTCAACAGATTCCTGTGCCAGTTC |
| | | GTCGCAGACAGAATGAGACTGACAGGAAAGGGAAAGAAGAGAGTCTTCGCATCGAACGGACAGATCACAAACCTGCTGAGAGGAT |
| | | TCTGGGGACTGAGAAAGGTCAGAGCAGAAAACGACAGACACCACGCACTGGACGCAGTCGTCGTCGCATGCTCGACAGTCGCAAT |
| | | GCAGCAGAAGATCACAAGATTCGTCAGATACAAGGAAATGAACGCATTCGACGGAAAGACAATCGACAAGGAAACAGGAGAAGTC |
| | | CTGCACCAGAAGACACACTTCCCGCAGCCGTGGGAATTCTTCGCACAGGAAGTCATGATCAGAGTCTTCGGAAAGCCGGACGGAA |
| | | AGCCGGAATTCGAAGAAGCAGACACACTGGAAAAGCTGAGAACACTGCTGGCAGAAAAGCTGTCGTCGAGACCGGAAGCAGTCCA |
| | | CGAATACGTCACACCGCTGTTCGTCTCGAGAGCACCGAACAGAAAGATGTCGGGACAGGGACACATGGAAACAGTCAAGTCGGCA |
| | | AAGAGACTGGACGAAGGAGTCTCGGTCCTGAGAGTCCCGCTGACACAGCTGAAGCTGAAGGACCTGGAAAAGATGGTCAACAGAG |
| | | AAAGAGAACCGAAGCTGTACGAAGCACTGAAGGCAAGACTGGAAGCACACAAGGACGACCCGGCAAAGGCATTCGCAGAACCGTT |
| | | CTACAAGTACGACAAGGCAGGAAACAGAACACAGCAGGTCAAGGCAGTCAGAGTCGAACAGGTCCAGAAGACAGGAGTCTGGGTC |
| | | AGAAACCACAACGGAATCGCAGACAACGCAACAATGGTCAGAGTAGACGTCTTCGAAAAGGGAGACAAGTACTACCTGGTCCCGA |
| | | TCTACTCGTGGCAGGTCGCAAAGGGAATCCTGCCGGACAGAGCAGTCGTCCAGGGAAAGGACGAAGAAGACTGGCAGCTGATCGA |
| | | CGACTCGTTCAACTTCAAGTTCTCGCTGCACCCGAACGACCTGGTCGAAGTCATCACAAAGAAGGCAAGAATGTTCGGATACTTC |
| | | GCATCGTGCCACAGAGGAACAGGAAACATCAACATCAGAATCCACGACCTGGACCACAAGATCGGAAAGAACGGAATCCTGGAAG |
| | | GAATCGGAGTCAAGACAGCACTGTCGTTCCAGAAGTACCAGATCGACGAACTGGGAAAGGAAATCAGACCGTGCAGACTGAAGAA |
| | | GAGACCGCCGGTCAGATCCGGAAAGAGAACAGCAGACGGATCGGAATTCGAATCGCCGAAGAAGAAGAGAAAGGTCGAATGA |
| Open reading frame | 824 | ATGACCAACCTGTCCGACATCATCGAGAAGGAGACCGGCAAGCAGCTGGTGATCCAGGAGTCCATCCTGATGCTGCCCGAGGAGG |
| for UGI encoded by | | TGGAGGAGGTGATCGGCAACAAGCCCGAGTCCGACATCCTGGTGCACACCGCCTACGACGAGTCCACCGACGAGAACGTGATGCT |
| SEQ NO: 821 | | GCTGACCTCCGACGCCCCCGAGTACAAGCCCTGGGCCCTGGTGATCCAGGACTCCAACGGCGAGAACAAGATCAAGATGCTGTCC |
| | | GGCGGCTCCAAGCGGACCGCCGACGGCTCCGAGTTCGAGTCCCCCAAGAAGAAGCGGAAGGTGGAGTGATAG |
| mRNA encoding Nme2 | 825 | GGGAAGCUCAGAAUAAACGCUCAACUUUGGCCGGAUCUGCCACCAUGGACGGCUCCGGCGGCGGCUCCCCCAAGAAGAAGCGGAA |
| Cas9 | | GGUGGAGGACAAGCGGCCCGCCGCCACCAAGAAGGCCGGCCAGGCCAAGAAGAAGAAGGGCGGCUCCGGCGGCGGCGCCGCCUUC |
| | | AAGCCCAACCCCAUCAACUACAUCCUGGGCCUGGACAUCGGCAUCGCCUCCGUGGGCUGGGCCAUGGUGGAGAUCGACGAGGAGG |
| | | AGAACCCCAUCCGGCUGAUCGACCUGGGCGUGCGGGUGUUCGAGCGGGCCGAGGUGCCCAAGACCGGCGACUCCCUGGCCAUGGC |
| | | CCGGCGGCUGGCCCGGUCCGUGCGGCGGCUGACCCGGCGGCGGGCCCACCGGCUGCUGCGGGCCCGGCGGCUGCUGAAGCGGGAG |
| | | GGCGUGCUGCAGGCCGCCGACUUCGACGAGAACGGCCUGAUCAAGUCCCUGCCCAACACCCCCUGGCAGCUGCGGGCCGCCGCCC |
| | | UGGACCGGAAGCUGACCCCCCUGGAGUGGUCCGCCGUGCUGCUGCACCUGAUCAAGCACCGGGGCUACCUGUCCCAGCGGAAGAA |
| | | CGAGGGCGAGACCGCCGACAAGGAGCUGGGCGCCCUGCUGAAGGGCGUGGCCAACAACGCCCACGCCCUGCAGACCGGCGACUUC |
| | | CGGACCCCCGCCGAGCUGGCCCUGAACAAGUUCGAGAAGGAGUCCGGCCACAUCCGGAACCAGCGGGGCGACUACUCCCACACCU |
| | | UCUCCCGGAAGGACCUGCAGGCCGAGCUGAUCCUGCUGUUCGAGAAGCAGAAGGAGUUCGGCAACCCCCACGUGUCCGGCGGCCU |
| | | GAAGGAGGGCAUCGAGACCCUGCUGAUGACCCAGCGGCCCGCCCUGUCCGGCGACGCCGUGCAGAAGAUGCUGGGCCACUGCACC |
| | | UUCGAGCCCGCCGAGCCCAAGGCCGCCAAGAACACCUACACCGCCGAGCGGUUCAUCUGGCUGACCAAGCUGAACAACCUGCGGA |
| | | UCCUGGAGCAGGGCUCCGAGCGGCCCCUGACCGACACCGAGCGGGCCACCCUGAUGGACGAGCCCUACCGGAAGUCCAAGCUGAC |
| | | CUACGCCCAGGCCCGGAAGCUGCUGGGCCUGGAGGACACCGCCUUCUUCAAGGGCCUGCGGUACGGCAAGGACAACGCCGAGGCC |
| | | UCCACCCUGAUGGAGAUGAAGGCCUACCACGCCAUCUCCCGGGCCCUGGAGAAGGAGGGCCUGAAGGACAAGAAGUCCCCCCUGA |
| | | ACCUGUCCUCCGAGCUGCAGGACGAGAUCGGCACCGCCUUCUCCCUGUUCAAGACCGACGAGGACAUCACCGGCCGGCUGAAGGA |
| | | CCGGGUGCAGCCCGAGAUCCUGGAGGCCCUGCUGAAGCACAUCUCCUUCGACAAGUUCGUGCAGAUCUCCCUGAAGGCCCUGCGG |
| | | CGGAUCGUGCCCCUGAUGGAGCAGGGCAAGCGGUACGACGAGGCCUGCGCCGAGAUCUACGGCGACCACUACGGCAAGAAGAACA |
| | | CCGAGGAGAAGAUCUACCUGCCCCCCAUCCCCGCCGACGAGAUCCGGAACCCCGUGGUGCUGCGGGCCCUGUCCCAGGCCCGGAA |
| | | GGUGAUCAACGGCGUGGUGCGGCGGUACGGCUCCCCCGCCCGGAUCCACAUCGAGACCGCCCGGGAGGUGGGCAAGUCCUUCAAG |
| | | GACCGGAAGGAGAUCGAGAAGCGGCAGGAGGAGAACCGGAAGGACCGGGAGAAGGCCGCCGCCAAGUUCCGGGAGUACUUCCCCA |
| | | ACUUCGUGGGCGAGCCCAAGUCCAAGGACAUCCUGAAGCUGCGGCUGUACGAGCAGCAGCACGGCAAGUGCCUGUACUCCGGCAA |
| | | GGAGAUCAACCUGGUGCGGCUGAACGAGAAGGGCUACGUGGAGAUCGACCACGCCCUGCCCUUCUCCCGGACCUGGGACGACUCC |
| | | UUCAACAACAAGGUGCUGGUGCUGGGCUCCGAGAACCAGAACAAGGGCAACCAGACCCCCUACGAGUACUUCAACGGCAAGGACA |
| | | ACUCCCGGGAGUGGCAGGAGUUCAAGGCCCGGGUGGAGACCUCCCGGUUCCCCCGGUCCAAGAAGCAGCGGAUCCUGCUGCAGAA |
| | | GUUCGACGAGGACGGCUUCAAGGAGUGCAACCUGAACGACACCCGGUACGUGAACCGGUUCCUGUGCCAGUUCGUGGCCGACCAC |
| | | AUCCUGCUGACCGGCAAGGGCAAGCGGCGGGUGUUCGCCUCCAACGGCCAGAUCACCAACCUGCUGCGGGGCUUCUGGGGCCUGC |
| | | GGAAGGUGCGGGCCGAGAACGACCGGCACCACGCCCUGGACGCCGUGGUGGUGGCCUGCUCCACCGUGGCCAUGCAGCAGAAGAU |
| | | CACCCGGUUCGUGCGGUACAAGGAGAUGAACGCCUUCGACGGCAAGACCAUCGACAAGGAGACCGGCAAGGUGCUGCACCAGAAG |
| | | ACCCACUUCCCCCAGCCCUGGGAGUUCUUCGCCCAGGAGGUGAUGAUCCGGGUGUUCGGCAAGCCCGACGGCAAGCCCGAGUUCG |
| | | AGGAGGCCGACACCCCCGAGAAGCUGCGGACCCUGCUGGCCGAGAAGCUGUCCUCCCGGCCCGAGGCCGUGCACGAGUACGUGAC |
| | | CCCCCUGUUCGUGUCCCGGGCCCCCAACCGGAAGAUGUCCGGCGCCCACAAGGACACCCUGCGGUCCGCCAAGCGGUUCGUGAAG |
| | | CACAACGAGAAGAUCUCCGUGAAGCGGGUGUGGCUGACCGAGAUCAAGCUGGCCGACCUGGAGAACAUGGUGAACUACAAGAACG |
| | | GCCGGGAGAUCGAGCUGUACGAGGCCCUGAAGGCCCGGCUGGAGGCCUACGGCGGCAACGCCAAGCAGGCCUUCGACCCCAAGGA |
| | | CAACCCCUUCUACAAGAAGGGCGGCCAGCUGGUGAAGGCCGUGCGGGUGGAGAAGACCCAGGAGUCCGGCGUGCUGCUGAACAAG |
| | | AAGAACGCCUACACCAUCGCCGACAACGGCGACAUGGUGCGGGUGGACGUGUUCUGCAAGGUGGACAAGAAGGGCAAGAACCAGU |
| | | ACUUCAUCGUGCCCAUCUACGCCUGGCAGGUGGCCGAGAACAUCCUGCCCGACAUCGACUGCAAGGGCUACCGGAUCGACGACUC |
| | | CUACACCUUCUGCUUCUCCCUGCACAAGUACGACCUGAUCGCCUUCCAGAAGGACGAGAAGUCCAAGGUGGAGUUCGCCUACUAC |
| | | AUCAACUGCGACUCCUCCAACGGCCGGUUCUACCUGGCCUGGCACGACAAGGGCUCCAAGGAGCAGCAGUUCCGGAUCUCCACCC |
| | | AGAACCUGGUGCUGAUCCAGAAGUACCAGGUGAACGAGCUGGGCAAGGAGAUCCGGCCCUGCCGGCUGAAGAAGCGGCCCCCCGU |
| | | GCGGUAGCUAGCACCAGCCUCAAGAACACCCGAAUGGAGUCUCUAAGCUACAUAAUACCAACUUACACUUUACAAAAUGUUGUCC |
| | | CCCAAAAUGUAGCCAUUCGUAUCUGCUCCUAAUAAAAAGAAAGUUUCUUCACAUUCUCUCGAGAAAAAAAAAAAAUGGAAAAAAA |
| | | AAAAACGGAAAAAAAAAAAAGGUAAAAAAAAAAAAUAUAAAAAAAAAAAACAUAAAAAAAAAAAACGAAAAAAAAAAAACGUAAA |
| | | AAAAAAAAACUCAAAAAAAAAAAGAUAAAAAAAAAAAACCUAAAAAAAAAAAAUGUAAAAAAAAAAAAGGGAAAAAAAAAAAACG |
| | | CAAAAAAAAAAAACACAAAAAAAAAAAAUGCAAAAAAAAAAAAUCGAAAAAAAAAAAAUCUAAAAAAAAAAAACGAAAAAAAAAA |
| | | AACCCAAAAAAAAAAAAGACAAAAAAAAAAAAUAGAAAAAAAAAAAGUUAAAAAAAAAAAACUGAAAAAAAAAAAAUUUAAAAAA |
| | | AAAAAAUCUAG |
| mRNA encoding Nme2 | 826 | GGGAAGCUCAGAAUAAACGCUCAACUUUGGCCGGAUCUGCCACCAUGGACGGCUCCGGCGGCGGCUCCCCCAAGAAGAAGCGGAA |
| Cas9 with Hibit tag | | GGUGGAGGACAAGCGGCCCGCCGCCACCAAGAAGGCCGGCCAGGCCAAGAAGAAGAAGGGCGGCUCCGGCGGCGGCGCCGCCUUC |
| | | AAGCCCAACCCCAUCAACUACAUCCUGGGCCUGGACAUCGGCAUCGCCUCCGUGGGCUGGGCCAUGGUGGAGAUCGACGAGGAGG |
| | | AGAACCCCAUCCGGCUGAUCGACCUGGGCGUGCGGGUGUUCGAGCGGGCCGAGGUGCCCAAGACCGGCGACUCCCUGGCCAUGGC |
| | | CCGGCGGCUGGCCCGGUCCGUGCGGCGGCUGACCCGGCGGCGGGCCCACCGGCUGCUGCGGGCCCGGCGGCUGCUGAAGCGGGAG |
| | | GGCGUGCUGCAGGCCGCCGACUUCGACGAGAACGGCCUGAUCAAGUCCCUGCCCAACACCCCCUGGCAGCUGCGGGCCGCCGCCC |
| | | UGGACCGGAAGCUGACCCCCCUGGAGUGGUCCGCCGUGCUGCUGCACCUGAUCAAGCACCGGGGCUACCUGUCCCAGCGGAAGAA |
| | | CGAGGGCGAGACCGCCGACAAGGAGCUGGGCGCCCUGCUGAAGGGCGUGGCCAACAACGCCCACGCCCUGCAGACCGGCGACUUC |
| | | CGGACCCCCGCCGAGCUGGCCCUGAACAAGUUCGAGAAGGAGUCCGGCCACAUCCGGAACCAGCGGGGCGACUACUCCCACACCU |
| | | UCUCCCGGAAGGACCUGCAGGCCGAGCUGAUCCUGCUGUUCGAGAAGCAGAAGGAGUUCGGCAACCCCCACGUGUCCGGCGGCCU |
| | | GAAGGAGGGCAUCGAGACCCUGCUGAUGACCCAGCGGCCCGCCCUGUCCGGCGACGCCGUGCAGAAGAUGCUGGGCCACUGCACC |
| | | UUCGAGCCCGCCGAGCCCAAGGCCGCCAAGAACACCUACACCGCCGAGCGGUUCAUCUGGCUGACCAAGCUGAACAACCUGCGGA |
| | | UCCUGGAGCAGGGCUCCGAGCGGCCCCUGACCGACACCGAGCGGGCCACCCUGAUGGACGAGCCCUACCGGAAGUCCAAGCUGAC |
| | | CUACGCCCAGGCCCGGAAGCUGCUGGGCCUGGAGGACACCGCCUUCUUCAAGGGCCUGCGGUACGGCAAGGACAACGCCGAGGCC |
| | | UCCACCCUGAUGGAGAUGAAGGCCUACCACGCCAUCUCCCGGGCCCUGGAGAAGGAGGGCCUGAAGGACAAGAAGUCCCCCCUGA |
| | | ACCUGUCCUCCGAGCUGCAGGACGAGAUCGGCACCGCCUUCUCCCUGUUCAAGACCGACGAGGACAUCACCGGCCGGCUGAAGGA |
| | | CCGGGUGCAGCCCGAGAUCCUGGAGGCCCUGCUGAAGCACAUCUCCUUCGACAAGUUCGUGCAGAUCUCCCUGAAGGCCCUGCGG |
| | | CGGAUCGUGCCCCUGAUGGAGCAGGGCAAGCGGUACGACGAGGCCUGCGCCGAGAUCUACGGCGACCACUACGGCAAGAAGAACA |
| | | CCGAGGAGAAGAUCUACCUGCCCCCCAUCCCCGCCGACGAGAUCCGGAACCCCGUGGUGCUGCGGGCCCUGUCCCAGGCCCGGAA |
| | | GGUGAUCAACGGCGUGGUGCGGCGGUACGGCUCCCCCGCCCGGAUCCACAUCGAGACCGCCCGGGAGGUGGGCAAGUCCUUCAAG |
| | | GACCGGAAGGAGAUCGAGAAGCGGCAGGAGGAGAACCGGAAGGACCGGGAGAAGGCCGCCGCCAAGUUCCGGGAGUACUUCCCCA |
| | | ACUUCGUGGGCGAGCCCAAGUCCAAGGACAUCCUGAAGCUGCGGCUGUACGAGCAGCAGCACGGCAAGUGCCUGUACUCCGGCAA |
| | | GGAGAUCAACCUGGUGCGGCUGAACGAGAAGGGCUACGUGGAGAUCGACCACGCCCUGCCCUUCUCCCGGACCUGGGACGACUCC |
| | | UUCAACAACAAGGUGCUGGUGCUGGGCUCCGAGAACCAGAACAAGGGCAACCAGACCCCCUACGAGUACUUCAACGGCAAGGACA |
| | | ACUCCCGGGAGUGGCAGGAGUUCAAGGCCCGGGUGGAGACCUCCCGGUUCCCCCGGUCCAAGAAGCAGCGGAUCCUGCUGCAGAA |
| | | GUUCGACGAGGACGGCUUCAAGGAGUGCAACCUGAACGACACCCGGUACGUGAACCGGUUCCUGUGCCAGUUCGUGGCCGACCAC |
| | | AUCCUGCUGACCGGCAAGGGCAAGCGGCGGGUGUUCGCCUCCAACGGCCAGAUCACCAACCUGCUGCGGGGCUUCUGGGGCCUGC |
| | | GGAAGGUGCGGGCCGAGAACGACCGGCACCACGCCCUGGACGCCGUGGUGGUGGCCUGCUCCACCGUGGCCAUGCAGCAGAAGAU |
| | | CACCCGGUUCGUGCGGUACAAGGAGAUGAACGCCUUCGACGGCAAGACCAUCGACAAGGAGACCGGCAAGGUGCUGCACCAGAAG |
| | | ACCCACUUCCCCCAGCCCUGGGAGUUCUUCGCCCAGGAGGUGAUGAUCCGGGUGUUCGGCAAGCCCGACGGCAAGCCCGAGUUCG |
| | | AGGAGGCCGACACCCCCGAGAAGCUGCGGACCCUGCUGGCCGAGAAGCUGUCCUCCCGGCCCGAGGCCGUGCACGAGUACGUGAC |
| | | CCCCCUGUUCGUGUCCCGGGCCCCCAACCGGAAGAUGUCCGGCGCCCACAAGGACACCCUGCGGUCCGCCAAGCGGUUCGUGAAG |
| | | CACAACGAGAAGAUCUCCGUGAAGCGGGUGUGGCUGACCGAGAUCAAGCUGGCCGACCUGGAGAACAUGGUGAACUACAAGAACG |
| | | GCCGGGAGAUCGAGCUGUACGAGGCCCUGAAGGCCCGGCUGGAGGCCUACGGCGGCAACGCCAAGCAGGCCUUCGACCCCAAGGA |
| | | CAACCCCUUCUACAAGAAGGGCGGCCAGCUGGUGAAGGCCGUGCGGGUGGAGAAGACCCAGGAGUCCGGCGUGCUGCUGAACAAG |
| | | AAGAACGCCUACACCAUCGCCGACAACGGCGACAUGGUGCGGGUGGACGUGUUCUGCAAGGUGGACAAGAAGGGCAAGAACCAGU |
| | | ACUUCAUCGUGCCCAUCUACGCCUGGCAGGUGGCCGAGAACAUCCUGCCCGACAUCGACUGCAAGGGCUACCGGAUCGACGACUC |
| | | CUACACCUUCUGCUUCUCCCUGCACAAGUACGACCUGAUCGCCUUCCAGAAGGACGAGAAGUCCAAGGUGGAGUUCGCCUACUAC |
| | | AUCAACUGCGACUCCUCCAACGGCCGGUUCUACCUGGCCUGGCACGACAAGGGCUCCAAGGAGCAGCAGUUCCGGAUCUCCACCC |
| | | AGAACCUGGUGCUGAUCCAGAAGUACCAGGUGAACGAGCUGGGCAAGGAGAUCCGGCCCUGCCGGCUGAAGAAGCGGCCCCCCGU |
| | | GCGGUCCGAGUCCGCCACCCCCGAGUCCGUGUCCGGCUGGCGGCUGUUCAAGAAGAUCUCCUAGCUAGCACCAGCCUCAAGAACA |
| | | CCCGAAUGGAGUCUCUAAGCUACAUAAUACCAACUUACACUUUACAAAAUGUUGUCCCCCAAAAUGUAGCCAUUCGUAUCUGCUC |
| | | CUAAUAAAAAGAAAGUUUCUUCACAUUCUCUCGAGAAAAAAAAAAAAUGGAAAAAAAAAAAACGGAAAAAAAAAAAAGGUAAAAA |
| | | AAAAAAAUAUAAAAAAAAAAAACAUAAAAAAAAAAAACGAAAAAAAAAAAACGUAAAAAAAAAAAACUCAAAAAAAAAAAAGAUA |
| | | AAAAAAAAAAACCUAAAAAAAAAAAAUGUAAAAAAAAAAAAGGGAAAAAAAAAAAACGCAAAAAAAAAAAACACAAAAAAAAAAA |
| | | AUGCAAAAAAAAAAAAUCGAAAAAAAAAAAAUCUAAAAAAAAAAAACGAAAAAAAAAAAACCCAAAAAAAAAAAAGACAAAAAAA |
| | | AAAAAUAGAAAAAAAAAAAAGUUAAAAAAAAAAAACUGAAAAAAAAAAAAUUUAAAAAAAAAAAAUCUAG |
| ORF encoding Spy Cas9 | 827 | ATGGACAAGAAGTACTCCATCGGCCTGGACATCGGCACCAACTCCGTGGGCTGGGCCGTGATCACCGACGAGTACAAGGTGCCCT |
| | | CCAAGAAGTTCAAGGTGCTGGGCAACACCGACCGGCACTCCATCAAGAAGAACCTGATCGGCGCCCTGCTGTTCGACTCCGGCGA |
| | | GACCGCCGAGGCCACCCGGCTGAAGCGGACCGCCCGGCGGCGGTACACCCGGCGGAAGAACCGGATCTGCTACCTGCAGGAGATC |
| | | TTCTCCAACGAGATGGCCAAGGTGGACGACTCCTTCTTCCACCGGCTGGAGGAGTCCTTCCTGGTGGAGGAGGACAAGAAGCACG |
| | | AGCGGCACCCCATCTTCGGCAACATCGTGGACGAGGTGGCCTACCACGAGAAGTACCCCACCATCTACCACCTGCGGAAGAAGCT |
| | | GGTGGACTCCACCGACAAGGCCGACCTGCGGCTGATCTACCTGGCCCTGGCCCACATGATCAAGTTCCGGGGCCACTTCCTGATC |
| | | GAGGGCGACCTGAACCCCGACAACTCCGACGTGGACAAGCTGTTCATCCAGCTGGTGCAGACCTACAACCAGCTGTTCGAGGAGA |
| | | ACCCCATCAACGCCTCCGGCGTGGACGCCAAGGCCATCCTGTCCGCCCGGCTGTCCAAGTCCCGGCGGCTGGAGAACCTGATCGC |
| | | CCAGCTGCCCGGCGAGAAGAAGAACGGCCTGTTCGGCAACCTGATCGCCCTGTCCCTGGGCCTGACCCCCAACTTCAAGTCCAAC |
| | | TTCGACCTGGCCGAGGACGCCAAGCTGCAGCTGTCCAAGGACACCTACGACGACGACCTGGACAACCTGCTGGCCCAGATCGGCG |
| | | ACCAGTACGCCGACCTGTTCCTGGCCGCCAAGAACCTGTCCGACGCCATCCTGCTGTCCGACATCCTGCGGGTGAACACCGAGAT |
| | | CACCAAGGCCCCCCTGTCCGCCTCCATGATCAAGCGGTACGACGAGCACCACCAGGACCTGACCCTGCTGAAGGCCCTGGTGCGG |
| | | CAGCAGCTGCCCGAGAAGTACAAGGAGATCTTCTTCGACCAGTCCAAGAACGGCTACGCCGGCTACATCGACGGCGGCGCCTCCC |
| | | AGGAGGAGTTCTACAAGTTCATCAAGCCCATCCTGGAGAAGATGGACGGCACCGAGGAGCTGCTGGTGAAGCTGAACCGGGAGGA |
| | | CCTGCTGCGGAAGCAGCGGACCTTCGACAACGGCTCCATCCCCCACCAGATCCACCTGGGCGAGCTGCACGCCATCCTGCGGCGG |
| | | CAGGAGGACTTCTACCCCTTCCTGAAGGACAACCGGGAGAAGATCGAGAAGATCCTGACCTTCCGGATCCCCTACTACGTGGGCC |
| | | CCCTGGCCCGGGGCAACTCCCGGTTCGCCTGGATGACCCGGAAGTCCGAGGAGACCATCACCCCCTGGAACTTCGAGGAGGTGGT |
| | | GGACAAGGGCGCCTCCGCCCAGTCCTTCATCGAGCGGATGACCAACTTCGACAAGAACCTGCCCAACGAGAAGGTGCTGCCCAAG |
| | | CACTCCCTGCTGTACGAGTACTTCACCGTGTACAACGAGCTGACCAAGGTGAAGTACGTGACCGAGGGCATGCGGAAGCCCGCCT |
| | | TCCTGTCCGGCGAGCAGAAGAAGGCCATCGTGGACCTGCTGTTCAAGACCAACCGGAAGGTGACCGTGAAGCAGCTGAAGGAGGA |
| | | CTACTTCAAGAAGATCGAGTGCTTCGACTCCGTGGAGATCTCCGGCGTGGAGGACCGGTTCAACGCCTCCCTGGGCACCTACCAC |
| | | GACCTGCTGAAGATCATCAAGGACAAGGACTTCCTGGACAACGAGGAGAACGAGGACATCCTGGAGGACATCGTGCTGACCCTGA |
| | | CCCTGTTCGAGGACCGGGAGATGATCGAGGAGCGGCTGAAGACCTACGCCCACCTGTTCGACGACAAGGTGATGAAGCAGCTGAA |
| | | GCGGCGGCGGTACACCGGCTGGGGCCGGCTGTCCCGGAAGCTGATCAACGGCATCCGGGACAAGCAGTCCGGCAAGACCATCCTG |
| | | GACTTCCTGAAGTCCGACGGCTTCGCCAACCGGAACTTCATGCAGCTGATCCACGACGACTCCCTGACCTTCAAGGAGGACATCC |
| | | AGAAGGCCCAGGTGTCCGGCCAGGGCGACTCCCTGCACGAGCACATCGCCAACCTGGCCGGCTCCCCCGCCATCAAGAAGGGCAT |
| | | CCTGCAGACCGTGAAGGTGGTGGACGAGCTGGTGAAGGTGATGGGCCGGCACAAGCCCGAGAACATCGTGATCGAGATGGCCCGG |
| | | GAGAACCAGACCACCCAGAAGGGCCAGAAGAACTCCCGGGAGCGGATGAAGCGGATCGAGGAGGGCATCAAGGAGCTGGGCTCCC |
| | | AGATCCTGAAGGAGCACCCCGTGGAGAACACCCAGCTGCAGAACGAGAAGCTGTACCTGTACTACCTGCAGAACGGCCGGGACAT |
| | | GTACGTGGACCAGGAGCTGGACATCAACCGGCTGTCCGACTACGACGTGGACCACATCGTGCCCCAGTCCTTCCTGAAGGACGAC |
| | | TCCATCGACAACAAGGTGCTGACCCGGTCCGACAAGAACCGGGGCAAGTCCGACAACGTGCCCTCCGAGGAGGTGGTGAAGAAGA |
| | | TGAAGAACTACTGGCGGCAGCTGCTGAACGCCAAGCTGATCACCCAGCGGAAGTTCGACAACCTGACCAAGGCCGAGCGGGGGG |
| | | CCTGTCCGAGCTGGACAAGGCCGGCTTCATCAAGCGGCAGCTGGTGGAGACCCGGCAGATCACCAAGCACGTGGCCCAGATCCTG |
| | | GACTCCCGGATGAACACCAAGTACGACGAGAACGACAAGCTGATCCGGGAGGTGAAGGTGATCACCCTGAAGTCCAAGCTGGTGT |
| | | CCGACTTCCGGAAGGACTTCCAGTTCTACAAGGTGCGGGAGATCAACAACTACCACCACGCCCACGACGCCTACCTGAACGCCGT |
| | | GGTGGGCACCGCCCTGATCAAGAAGTACCCCAAGCTGGAGTCCGAGTTCGTGTACGGCGACTACAAGGTGTACGACGTGCGGAAG |
| | | ATGATCGCCAAGTCCGAGCAGGAGATCGGCAAGGCCACCGCCAAGTACTTCTTCTACTCCAACATCATGAACTTCTTCAAGACCG |
| | | AGATCACCCTGGCCAACGGCGAGATCCGGAAGCGGCCCCTGATCGAGACCAACGGCGAGACCGGCGAGATCGTGTGGGACAAGGG |
| | | CCGGGACTTCGCCACCGTGCGGAAGGTGCTGTCCATGCCCCAGGTGAACATCGTGAAGAAGACCGAGGTGCAGACCGGCGGCTTC |
| | | TCCAAGGAGTCCATCCTGCCCAAGCGGAACTCCGACAAGCTGATCGCCCGGAAGAAGGACTGGGACCCCAAGAAGTACGGCGGCT |
| | | TCGACTCCCCCACCGTGGCCTACTCCGTGCTGGTGGTGGCCAAGGTGGAGAAGGGCAAGTCCAAGAAGCTGAAGTCCGTGAAGGA |
| | | GCTGCTGGGCATCACCATCATGGAGCGGTCCTCCTTCGAGAAGAACCCCATCGACTTCCTGGAGGCCAAGGGCTACAAGGAGGTG |
| | | AAGAAGGACCTGATCATCAAGCTGCCCAAGTACTCCCTGTTCGAGCTGGAGAACGGCCGGAAGCGGATGCTGGCCTCCGCCGGCG |
| | | AGCTGCAGAAGGGCAACGAGCTGGCCCTGCCCTCCAAGTACGTGAACTTCCTGTACCTGGCCTCCCACTACGAGAAGCTGAAGGG |
| | | CTCCCCCGAGGACAACGAGCAGAAGCAGCTGTTCGTGGAGCAGCACAAGCACTACCTGGACGAGATCATCGAGCAGATCTCCGAG |
| | | TTCTCCAAGCGGGTGATCCTGGCCGACGCCAACCTGGACAAGGTGCTGTCCGCCTACAACAAGCACCGGGACAAGCCCATCCGGG |
| | | AGCAGGCCGAGAACATCATCCACCTGTTCACCCTGACCAACCTGGGCGCCCCCGCCGCCTTCAAGTACTTCGACACCACCATCGA |
| | | CCGGAAGCGGTACACCTCCACCAAGGAGGTGCTGGACGCCACCCTGATCCACCAGTCCATCACCGGCCTGTACGAGACCCGGATC |
| | | GACCTGTCCCAGCTGGGCGGCGACGGCGGCGGCTCCCCCAAGAAGAAGCGGAAGGTGTGA |
| ORF encoding Spy Cas9 | 828 | aagctcagaataaacgctcaactttggccggatctgccaccATGGACGGCTCCGGCGGCGGCTCCCCCAAGAAGAAGCGGAAGGT |
| | | GGAGGACAAGCGGCCCGCCGCCACCAAGAAGGCCGGCCAGGCCAAGAAGAAGAAGGGCGGCTCCGGCGGCGGCGAGGCCTCCCCC |
| | | GCCTCCGGCCCCCGGCACCTGATGGACCCCCACATCTTCACCTCCAACTTCAACAACGGCATCGGCCGGCACAAGACCTACCTGT |
| | | GCTACGAGGTGGAGCGGCTGGACAACGGCACCTCCGTGAAGATGGACCAGCACCGGGGCTTCCTGCACAACCAGGCCAAGAACCT |
| | | GCTGTGCGGCTTCTACGGCCGGCACGCCGAGCTGCGGTTCCTGGACCTGGTGCCCTCCCTGCAGCTGGACCCCGCCCAGATCTAC |
| | | CGGGTGACCTGGTTCATCTCCTGGTCCCCCTGCTTCTCCTGGGGCTGCGCCGGCGAGGTGCGGGCCTTCCTGCAGGAGAACACCC |
| | | ACGTGCGGCTGCGGATCTTCGCCGCCCGGATCTACGACTACGACCCCCTGTACAAGGAGGCCCTGCAGATGCTGCGGGACGCCGG |
| | | CGCCCAGGTGTCCATCATGACCTACGACGAGTTCAAGCACTGCTGGGACACCTTCGTGGACCACCAGGGCTGCCCCTTCCAGCCC |
| | | TGGGACGGCCTGGACGAGCACTCCCAGGCCCTGTCCGGCCGGCTGCGGGCCATCCTGCAGAACCAGGGCAACTCCGGCTCCGAGA |
| | | CCCCCGGCACCTCCGAGTCCGCCACCCCCGAGTCCGCAGCGTTCAAACCAAATcccatcaactacatcctgggcctggccatcgg |
| | | catcgcctccgtgggctgggccatggtggagatcgacgaggaggagaaccccatccggctgatcgacctgggcgtgcgggtgttc |
| | | gagcgggccgaggtgcccaagaccggcgactccctggccatggcccggcggctggcccggtccgtgcggcggctgacccggcggc |
| | | gggcccaccggctgctgcgggcccggcggctgctgaagcgggagggcgtgctgcaggccgccgacttcgacgagaacggcctgat |
| | | caagtccctgcccaacaccccctggcagctgcgggccgccgccctggaccggaagctgacccccctggagtggtccgccgtgctg |
| | | ctgcacctgatcaagcaccggggctacctgtcccagcggaagaacgagggcgagaccgccgacaaggagctgggcgccctgctga |
| | | agggcgtggccaacaacgcccacgccctgcagaccggcgacttccggacccccgccgagctggccctgaacaagttcgagaagga |
| | | gtccggccacatccggaaccagcggggcgactactcccacaccttctcccggaaggacctgcaggccgagctgatcctgctgttc |
| | | gagaagcagaaggagttcggcaacccccacgtgtccggcggcctgaaggagggcatcgagaccctgctgatgacccagcggcccg |
| | | ccctgtccggcgacgccgtgcagaagatgctgggccactgcaccttcgagcccgccgagcccaaggccgccaagaacacctacac |
| | | cgccgagcggttcatctggctgaccaagctgaacaacctgcggatcctggagcagggctccgagcggcccctgaccgacaccgag |
| | | cgggccaccctgatggacgagccctaccggaagtccaagctgacctacgcccaggcccggaagctgctgggcctggaggacaccg |
| | | ccttcttcaagggcctgcggtacggcaaggacaacgccgaggcctccaccctgatggagatgaaggcctaccacgccatctcccg |
| | | ggccctggagaaggagggcctgaaggacaagaagtcccccctgaacctgtcctccgagctgcaggacgagatcggcaccgccttc |
| | | tccctgttcaagaccgacgaggacatcaccggccggctgaaggaccgggtgcagcccgagatcctggaggccctgctgaagcaca |
| | | tctccttcgacaagttcgtgcagatctccctgaaggccctgcggcggatcgtgcccctgatggagcagggcaagcggtacgacga |
| | | ggcctgcgccgagatctacggcgaccactacggcaagaagaacaccgaggagaagatctacctgccccccatccccgccgacgag |
| | | atccggaaccccgtggtgctgcgggccctgtcccaggcccggaaggtgatcaacggcgtggtgcggcggtacggctcccccgccc |
| | | ggatccacatcgagaccgcccgggaggtgggcaagtccttcaaggaccggaaggagatcgagaagcggcaggaggagaaccggaa |
| | | ggaccgggagaaggccgccgccaagttccgggagtacttccccaacttcgtgggcgagcccaagtccaaggacatcctgaagctg |
| | | cggctgtacgagcagcagcacggcaagtgcctgtactccggcaaggagatcaacctggtgcggctgaacgagaagggctacgtgg |
| | | agatcgaccacgccctgcccttctcccggacctgggacgactccttcaacaacaaggtgctggtgctgggctccgagaaccagaa |
| | | caagggcaaccagaccccctacgagtacttcaacggcaaggacaactcccgggagtggcaggagttcaaggcccgggtggagacc |
| | | tcccggttcccccggtccaagaagcagcggatcctgctgcagaagttcgacgaggacggcttcaaggagtgcaacctgaacgaca |
| | | cccggtacgtgaaccgcttcctgtgccagttcgtggccgaccacatcctgctgaccggcaagggcaagcggcgggtgttcgcctc |
| | | caacggccagatcaccaacctgctgcggggcttctggggcctgcggaaggtgcgggccgagaacgaccggcaccacgccctggac |
| | | gccgtggtggtggcctgctccaccgtggccatgcagcagaagatcacccggttcgtgcggtacaaggagatgaacgccttcgacg |
| | | gcaagaccatcgacaaggagaccggcaaggtgctgcaccagaagacccacttcccccagccctgggagttcttcgcccaggaggt |
| | | gatgatccgggtgttcggcaagcccgacggcaagcccgagttcgaggaggccgacacccccgagaagctgcggaccctgctggcc |
| | | gagaagctgtcctcccggcccgaggccgtgcacgagtacgtgacccccctgttcgtgtcccgggcccccaaccggaagatgtccg |
| | | gcgcccacaaggacaccctgcggtccgccaagcggttcgtgaagcacaacgagaagatctccgtgaagcgggtgtggctgaccga |
| | | gatcaagctggccgacctggagaacatggtgaactacaagaacggccgggagatcgagctgtacgaggccctgaaggcccggctg |
| | | gaggcctacggcggcaacgccaagcaggccttcgaccccaaggacaaccccttctacaagaagggcggccagctggtgaaggccg |
| | | tgcgggtggagaagacccaggagtccggcgtgctgctgaacaagaagaacgcctacaccatcgccgacaacggcgacatggtgcg |
| | | ggtggacgtgttctgcaaggtggacaagaagggcaagaaccagtacttcatcgtgcccatctacgcctggcaggtggccgagaac |
| | | atcctgcccgacatcgactgcaagggctaccggatcgacgactcctacaccttctgcttctccctgcacaagtacgacctgatcg |
| | | ccttccagaaggacgagaagtccaaggtggagttcgcctactacatcaactgcgactcctccaacggccggttctacctggcctg |
| | | gcacgacaagggctccaaggagcagcagttccggatctccacccagaacctggtgctgatccagaagtaccaggtgaacgagctg |
| | | ggcaaggagatccggccctgccggctgaagaagcggccccccgtgcggtagTGActagcaccagcctcaagaacacccgaatgga |
| | | gtctctaagctacataataccaacttacactttacaaaatgttgtcccccaaaatgtagccattcgtatctgctcctaataaaaa |
| | | gaaagtttcttcacattct |
| | 829-899 | Not used |
| Exemplary XTEN linker | 900 | SGSETPGTSESATPES |
| sequence | | |
| Exemplary XTEN linker | 901 | SGSETPGTSESA |
| sequence | | |
| Exemplary XTEN linker | 902 | SGSETPGTSESATPEGGSGGS |
| sequence | | |
| Exemplary NLS | 903 | PKKKRKV |
| sequence | | |
| Exemplary NLS | 904 | PKKKRRV |
| sequence | | |
| Exemplary bipartite | 905 | KRPAATKKAGQAKKKK |
| NLS sequence | | |
| exemplary XTEN | 906 | SGSETPGTSESATPES |
| exemplary XTEN | 907 | SGSETPGTSESA |
| exemplary XTEN | 908 | SGSETPGTSESATPEGGSGGS |
| amino acid sequence | 909 | GGS |
| for exemplary linker | | |
| amino acid sequence | 910 | GGGGS |
| for exemplary linker | | |
| amino acid sequence | 911 | EAAAK |
| for exemplary linker | | |
| amino acid sequence | 912 | SEGSA |
| for exemplary linker | | |
| amino acid sequence | 913 | SEGSAGTST |
| for exemplary linker | | |
| amino acid sequence | 914 | GGGGSGGGGS |
| for exemplary linker | | |
| amino acid sequence | 915 | GGGGSEAAAK |
| for exemplary linker | | |
| amino acid sequence | 916 | EAAAKGGGGS |
| for exemplary linker | | |
| amino acid sequence | 917 | EAAAKEAAAK |
| for exemplary linker | | |
| amino acid sequence | 918 | SEGSAGTSTESEGSA |
| for exemplary linker | | |
| amino acid sequence | 919 | GGGGSGGGGSGGGGS |
| for exemplary linker | | |
| amino acid sequence | 920 | GGGGSGGGGSEAAAK |
| for exemplary linker | | |
| amino acid sequence | 921 | GGGGSEAAAKGGGGS |
| for exemplary linker | | |
| amino acid sequence | 922 | EAAAKGGGGSEAAAK |
| for exemplary linker | | |
| amino acid sequence | 923 | EAAAKEAAAKGGGGS |
| for exemplary linker | | |
| amino acid sequence | 924 | SEGSAGTSTESEGSAGTSTE |
| for exemplary linker | | |
| amino acid sequence | 925 | GGGGSGGGGSGGGGSEAAAK |
| for exemplary linker | | |
| amino acid sequence | 926 | GGGGSGGGGSEAAAKGGGGS |
| for exemplary linker | | |
| amino acid sequence | 927 | GGGGSEAAAKGGGGSEAAAK |
| for exemplary linker | | |
| amino acid sequence | 928 | GGGGSEAAAKEAAAKGGGGS |
| for exemplary linker | | |
| amino acid sequence | 929 | GGGGSEAAAKEAAAKEAAAK |
| for exemplary linker | | |
| amino acid sequence | 930 | EAAAKGGGGSGGGGSGGGGS |
| for exemplary linker | | |
| amino acid sequence | 931 | EAAAKGGGGSGGGGSEAAAK |
| for exemplary linker | | |
| amino acid sequence | 932 | EAAAKGGGGSEAAAKGGGGS |
| for exemplary linker | | |
| amino acid sequence | 933 | EAAAKGGGGSEAAAKEAAAK |
| for exemplary linker | | |
| amino acid sequence | 934 | EAAAKEAAAKGGGGSGGGGS |
| for exemplary linker | | |
| amino acid sequence | 935 | EAAAKEAAAKGGGGSEAAAK |
| for exemplary linker | | |
| amino acid sequence | 936 | EAAAKEAAAKEAAAKGGGGS |
| for exemplary linker | | |
| amino acid sequence | 937 | SEGSAGTSTESEGSAGTSTESEGSA |
| for exemplary linker | | |
| amino acid sequence | 938 | GGGGSGGGGSGGGGSGGGGSGGGGS |
| for exemplary linker | | |
| amino acid sequence | 939 | GGGGSGGGGSGGGGSGGGGSEAAAK |
| for exemplary linker | | |
| amino acid sequence | 940 | GGGGGGGGSGGGGSEAAAKGGGGS |
| for exemplary linker | | |
| amino acid sequence | 941 | GGGGSGGGGSGGGGSEAAAKEAAAK |
| for exemplary linker | | |
| amino acid sequence | 942 | GGGGSGGGGSEAAAKGGGGSGGGGS |
| for exemplary linker | | |
| amino acid sequence | 943 | GGGGSGGGGSEAAAKGGGGSEAAAK |
| for exemplary linker | | |
| amino acid sequence | 944 | GGGGSGGGGSEAAAKEAAAKGGGGS |
| for exemplary linker | | |
| amino acid sequence | 945 | GGGGSGGGGSEAAAKEAAAKEAAAK |
| for exemplary linker | | |
| amino acid sequence | 946 | GGGGSEAAAKGGGGSGGGGSGGGGS |
| for exemplary linker | | |
| amino acid sequence | 947 | GGGGSEAAAKGGGGSGGGGSEAAAK |
| for exemplary linker | | |
| amino acid sequence | 948 | GGGGSEAAAKGGGGSEAAAKGGGGS |
| for exemplary linker | | |
| amino acid sequence | 949 | GGGGSEAAAKGGGGSEAAAKEAAAK |
| for exemplary linker | | |
| amino acid sequence | 950 | GGGGSEAAAKEAAAKGGGGSGGGGS |
| for exemplary linker | | |
| amino acid sequence | 951 | GGGGSEAAAKEAAAKEAAAKGGGGS |
| for exemplary linker | | |
| amino acid sequence | 952 | GGGGSEAAAKEAAAKEAAAKEAAAK |
| for exemplary linker | | |
| amino acid sequence | 953 | EAAAKGGGGSGGGGSGGGGSGGGGS |
| for exemplary linker | | |
| amino acid sequence | 954 | EAAAKGGGGSGGGGGGGGSEAAAK |
| for exemplary linker | | |
| amino acid sequence | 955 | EAAAKGGGGSGGGGSEAAAKGGGGS |
| for exemplary linker | | |
| amino acid sequence | 956 | EAAAKGGGGSGGGGSEAAAKEAAAK |
| for exemplary linker | | |
| amino acid sequence | 957 | EAAAKGGGGSEAAAKGGGGSGGGGS |
| for exemplary linker | | |
| amino acid sequence | 958 | EAAAKGGGGSEAAAKGGGGSEAAAK |
| for exemplary linker | | |
| amino acid sequence | 959 | EAAAKGGGGSEAAAKEAAAKGGGGS |
| for exemplary linker | | |
| amino acid sequence | 960 | EAAAKGGGGSEAAAKEAAAKEAAAK |
| for exemplary linker | | |
| amino acid sequence | 961 | EAAAKEAAAKGGGGSEAAAKGGGGS |
| for exemplary linker | | |
| amino acid sequence | 962 | EAAAKEAAAKGGGGSEAAAKEAAAK |
| for exemplary linker | | |
| amino acid sequence | 963 | EAAAKEAAAKEAAAKGGGGSEAAAK |
| for exemplary linker | | |
| amino acid sequence | 964 | EAAAKEAAAKEAAAKEAAAKGGGGS |
| for exemplary linker | | |
| amino acid sequence | 965 | EAAAKEAAAKEAAAKEAAAKEAAAK |
| for exemplary linker | | |
| amino acid sequence | 966 | GTKDSTKDIPETPSKD |
| for exemplary linker | | |
| amino acid sequence | 967 | GRDVRQPEVKEEKPES |
| for exemplary linker | | |
| amino acid sequence | 968 | EGKSSGSGSESKSTAG |
| for exemplary linker | | |
| amino acid sequence | 969 | TPGS PAGS PTSTEEGT |
| for exemplary linker | | |
| amino acid sequence | 970 | GSEPATSGSETPGTST |
| for exemplary linker | | |
| mRNA encoding BC22n | 972 | GGGAAGCUCAGAAUAAACGCUCAACUUUGGCCGGAUCUGCCACCAUGGAGGCCUCCCCCGCCUCCGGCCCCCGGCACCUGAUGGA |
| | | CCCCCACAUCUUCACCUCCAACUUCAACAACGGCAUCGGCCGGCACAAGACCUACCUGUGCUACGAGGUGGAGCGGCUGGACAAC |
| | | GGCACCUCCGUGAAGAUGGACCAGCACCGGGGCUUCCUGCACAACCAGGCCAAGAACCUGCUGUGCGGCUUCUACGGCCGGCACG |
| | | CCGAGCUGCGGUUCCUGGACCUGGUGCCCUCCCUGCAGCUGGACCCCGCCCAGAUCUACCGGGUGACCUGGUUCAUCUCCUGGUC |
| | | CCCCUGCUUCUCCUGGGGCUGCGCCGGCGAGGUGCGGGCCUUCCUGCAGGAGAACACCCACGUGCGGCUGCGGAUCUUCGCCGCC |
| | | CGGAUCUACGACUACGACCCCCUGUACAAGGAGGCCCUGCAGAUGCUGCGGGACGCCGGCGCCCAGGUGUCCAUCAUGACCUACG |
| | | ACGAGUUCAAGCACUGCUGGGACACCUUCGUGGACCACCAGGGCUGCCCCUUCCAGCCCUGGGACGGCCUGGACGAGCACUCCCA |
| | | GGCCCUGUCCGGCCGGCUGCGGGCCAUCCUGCAGAACCAGGGCAACUCCGGCUCCGAGACCCCCGGCACCUCCGAGUCCGCCACC |
| | | CCCGAGUCCGACAAGAAGUACUCCAUCGGCCUGGCCAUCGGCACCAACUCCGUGGGCUGGGCCGUGAUCACCGACGAGUACAAGG |
| | | UGCCCUCCAAGAAGUUCAAGGUGCUGGGCAACACCGACCGGCACUCCAUCAAGAAGAACCUGAUCGGCGCCCUGCUGUUCGACUC |
| | | CGGCGAGACCGCCGAGGCCACCCGGCUGAAGCGGACCGCCCGGCGGCGGUACACCCGGCGGAAGAACCGGAUCUGCUACCUGCAG |
| | | GAGAUCUUCUCCAACGAGAUGGCCAAGGUGGACGACUCCUUCUUCCACCGGCUGGAGGAGUCCUUCCUGGUGGAGGAGGACAAGA |
| | | AGCACGAGCGGCACCCCAUCUUCGGCAACAUCGUGGACGAGGUGGCCUACCACGAGAAGUACCCCACCAUCUACCACCUGCGGAA |
| | | GAAGCUGGUGGACUCCACCGACAAGGCCGACCUGCGGCUGAUCUACCUGGCCCUGGCCCACAUGAUCAAGUUCCGGGGCCACUUC |
| | | CUGAUCGAGGGCGACCUGAACCCCGACAACUCCGACGUGGACAAGCUGUUCAUCCAGCUGGUGCAGACCUACAACCAGCUGUUCG |
| | | AGGAGAACCCCAUCAACGCCUCCGGCGUGGACGCCAAGGCCAUCCUGUCCGCCCGGCUGUCCAAGUCCCGGCGGCUGGAGAACCU |
| | | GAUCGCCCAGCUGCCCGGCGAGAAGAAGAACGGCCUGUUCGGCAACCUGAUCGCCCUGUCCCUGGGCCUGACCCCCAACUUCAAG |
| | | UCCAACUUCGACCUGGCCGAGGACGCCAAGCUGCAGCUGUCCAAGGACACCUACGACGACGACCUGGACAACCUGCUGGCCCAGA |
| | | UCGGCGACCAGUACGCCGACCUGUUCCUGGCCGCCAAGAACCUGUCCGACGCCAUCCUGCUGUCCGACAUCCUGCGGGUGAACAC |
| | | CGAGAUCACCAAGGCCCCCCUGUCCGCCUCCAUGAUCAAGCGGUACGACGAGCACCACCAGGACCUGACCCUGCUGAAGGCCCUG |
| | | GUGCGGCAGCAGCUGCCCGAGAAGUACAAGGAGAUCUUCUUCGACCAGUCCAAGAACGGCUACGCCGGCUACAUCGACGGCGGCG |
| | | CCUCCCAGGAGGAGUUCUACAAGUUCAUCAAGCCCAUCCUGGAGAAGAUGGACGGCACCGAGGAGCUGCUGGUGAAGCUGAACCG |
| | | GGAGGACCUGCUGCGGAAGCAGCGGACCUUCGACAACGGCUCCAUCCCCCACCAGAUCCACCUGGGCGAGCUGCACGCCAUCCUG |
| | | CGGCGGCAGGAGGACUUCUACCCCUUCCUGAAGGACAACCGGGAGAAGAUCGAGAAGAUCCUGACCUUCCGGAUCCCCUACUACG |
| | | UGGGCCCCCUGGCCCGGGGCAACUCCCGGUUCGCCUGGAUGACCCGGAAGUCCGAGGAGACCAUCACCCCCUGGAACUUCGAGGA |
| | | GGUGGUGGACAAGGGCGCCUCCGCCCAGUCCUUCAUCGAGCGGAUGACCAACUUCGACAAGAACCUGCCCAACGAGAAGGUGCUG |
| | | CCCAAGCACUCCCUGCUGUACGAGUACUUCACCGUGUACAACGAGCUGACCAAGGUGAAGUACGUGACCGAGGGCAUGCGGAAGC |
| | | CCGCCUUCCUGUCCGGCGAGCAGAAGAAGGCCAUCGUGGACCUGCUGUUCAAGACCAACCGGAAGGUGACCGUGAAGCAGCUGAA |
| | | GGAGGACUACUUCAAGAAGAUCGAGUGCUUCGACUCCGUGGAGAUCUCCGGCGUGGAGGACCGGUUCAACGCCUCCCUGGGCACC |
| | | UACCACGACCUGCUGAAGAUCAUCAAGGACAAGGACUUCCUGGACAACGAGGAGAACGAGGACAUCCUGGAGGACAUCGUGCUGA |
| | | CCCUGACCCUGUUCGAGGACCGGGAGAUGAUCGAGGAGCGGCUGAAGACCUACGCCCACCUGUUCGACGACAAGGUGAUGAAGCA |
| | | GCUGAAGCGGCGGCGGUACACCGGCUGGGGCCGGCUGUCCCGGAAGCUGAUCAACGGCAUCCGGGACAAGCAGUCCGGCAAGACC |
| | | AUCCUGGACUUCCUGAAGUCCGACGGCUUCGCCAACCGGAACUUCAUGCAGCUGAUCCACGACGACUCCCUGACCUUCAAGGAGG |
| | | ACAUCCAGAAGGCCCAGGUGUCCGGCCAGGGCGACUCCCUGCACGAGCACAUCGCCAACCUGGCCGGCUCCCCCGCCAUCAAGAA |
| | | GGGCAUCCUGCAGACCGUGAAGGUGGUGGACGAGCUGGUGAAGGUGAUGGGCCGGCACAAGCCCGAGAACAUCGUGAUCGAGAUG |
| | | GCCCGGGAGAACCAGACCACCCAGAAGGGCCAGAAGAACUCCCGGGAGCGGAUGAAGCGGAUCGAGGAGGGCAUCAAGGAGCUGG |
| | | GCUCCCAGAUCCUGAAGGAGCACCCCGUGGAGAACACCCAGCUGCAGAACGAGAAGCUGUACCUGUACUACCUGCAGAACGGCCG |
| | | GGACAUGUACGUGGACCAGGAGCUGGACAUCAACCGGCUGUCCGACUACGACGUGGACCACAUCGUGCCCCAGUCCUUCCUGAAG |
| | | GACGACUCCAUCGACAACAAGGUGCUGACCCGGUCCGACAAGAACCGGGGCAAGUCCGACAACGUGCCCUCCGAGGAGGUGGUGA |
| | | AGAAGAUGAAGAACUACUGGCGGCAGCUGCUGAACGCCAAGCUGAUCACCCAGCGGAAGUUCGACAACCUGACCAAGGCCGAGCG |
| | | GGGCGGCCUGUCCGAGCUGGACAAGGCCGGCUUCAUCAAGCGGCAGCUGGUGGAGACCCGGCAGAUCACCAAGCACGUGGCCCAG |
| | | AUCCUGGACUCCCGGAUGAACACCAAGUACGACGAGAACGACAAGCUGAUCCGGGAGGUGAAGGUGAUCACCCUGAAGUCCAAGC |
| | | UGGUGUCCGACUUCCGGAAGGACUUCCAGUUCUACAAGGUGCGGGAGAUCAACAACUACCACCACGCCCACGACGCCUACCUGAA |
| | | CGCCGUGGUGGGCACCGCCCUGAUCAAGAAGUACCCCAAGCUGGAGUCCGAGUUCGUGUACGGCGACUACAAGGUGUACGACGUG |
| | | CGGAAGAUGAUCGCCAAGUCCGAGCAGGAGAUCGGCAAGGCCACCGCCAAGUACUUCUUCUACUCCAACAUCAUGAACUUCUUCA |
| | | AGACCGAGAUCACCCUGGCCAACGGCGAGAUCCGGAAGCGGCCCCUGAUCGAGACCAACGGCGAGACCGGCGAGAUCGUGUGGGA |
| | | CAAGGGCCGGGACUUCGCCACCGUGCGGAAGGUGCUGUCCAUGCCCCAGGUGAACAUCGUGAAGAAGACCGAGGUGCAGACCGGC |
| | | GGCUUCUCCAAGGAGUCCAUCCUGCCCAAGCGGAACUCCGACAAGCUGAUCGCCCGGAAGAAGGACUGGGACCCCAAGAAGUACG |
| | | GCGGCUUCGACUCCCCCACCGUGGCCUACUCCGUGCUGGUGGUGGCCAAGGUGGAGAAGGGCAAGUCCAAGAAGCUGAAGUCCGU |
| | | GAAGGAGCUGCUGGGCAUCACCAUCAUGGAGCGGUCCUCCUUCGAGAAGAACCCCAUCGACUUCCUGGAGGCCAAGGGCUACAAG |
| | | GAGGUGAAGAAGGACCUGAUCAUCAAGCUGCCCAAGUACUCCCUGUUCGAGCUGGAGAACGGCCGGAAGCGGAUGCUGGCCUCCG |
| | | CCGGCGAGCUGCAGAAGGGCAACGAGCUGGCCCUGCCCUCCAAGUACGUGAACUUCCUGUACCUGGCCUCCCACUACGAGAAGCU |
| | | GAAGGGCUCCCCCGAGGACAACGAGCAGAAGCAGCUGUUCGUGGAGCAGCACAAGCACUACCUGGACGAGAUCAUCGAGCAGAUC |
| | | UCCGAGUUCUCCAAGCGGGUGAUCCUGGCCGACGCCAACCUGGACAAGGUGCUGUCCGCCUACAACAAGCACCGGGACAAGCCCA |
| | | UCCGGGAGCAGGCCGAGAACAUCAUCCACCUGUUCACCCUGACCAACCUGGGCGCCCCCGCCGCCUUCAAGUACUUCGACACCAC |
| | | CAUCGACCGGAAGCGGUACACCUCCACCAAGGAGGUGCUGGACGCCACCCUGAUCCACCAGUCCAUCACCGGCCUGUACGAGACC |
| | | CGGAUCGACCUGUCCCAGCUGGGCGGCGACGGCGGCGGCUCCCCCAAGAAGAAGCGGAAGGUGUGACUAGCACCAGCCUCAAGAA |
| | | CACCCGAAUGGAGUCUCUAAGCUACAUAAUACCAACUUACACUUUACAAAAUGUUGUCCCCCAAAAUGUAGCCAUUCGUAUCUGC |
| | | UCCUAAUAAAAAGAAAGUUUCUUCACAUUCUCUCGAGAAAAAAAAAAAAUGGAAAAAAAAAAAACGGAAAAAAAAAAAAGGUAAA |
| | | AAAAAAAAAUAUAAAAAAAAAAAACAUAAAAAAAAAAAACGAAAAAAAAAAAACGUAAAAAAAAAAAACUCAAAAAAAAAAAAGA |
| | | UAAAAAAAAAAAACCUAAAAAAAAAAAAUGUAAAAAAAAAAAAGGGAAAAAAAAAAAACGCAAAAAAAAAAAACACAAAAAAAAA |
| | | AAAUGCAAAAAAAAAAAAUCGAAAAAAAAAAAAUCUAAAAAAAAAAAACGAAAAAAAAAAAACCCAAAAAAAAAAAAGACAAAAA |
| | | AAAAAAAUAGAAAAAAAAAAAAGUUAAAAAAAAAAAACUGAAAAAAAAAAAAUUUAAAAAAAAAAAAUCUAG |
| mRNA encoding BC22n | 973 | GGGAAGCUCAGAAUAAACGCUCAACUUUGGCCGGAUCUGCCACCAUGGAGGCCUCCCCCGCCUCCGGCCCCCGGCACCUGAUGGA |
| with HiBit tag | | CCCCCACAUCUUCACCUCCAACUUCAACAACGGCAUCGGCCGGCACAAGACCUACCUGUGCUACGAGGUGGAGCGGCUGGACAAC |
| | | GGCACCUCCGUGAAGAUGGACCAGCACCGGGGCUUCCUGCACAACCAGGCCAAGAACCUGCUGUGCGGCUUCUACGGCCGGCACG |
| | | CCGAGCUGCGGUUCCUGGACCUGGUGCCCUCCCUGCAGCUGGACCCCGCCCAGAUCUACCGGGUGACCUGGUUCAUCUCCUGGUC |
| | | CCCCUGCUUCUCCUGGGGCUGCGCCGGCGAGGUGCGGGCCUUCCUGCAGGAGAACACCCACGUGCGGCUGCGGAUCUUCGCCGCC |
| | | CGGAUCUACGACUACGACCCCCUGUACAAGGAGGCCCUGCAGAUGCUGCGGGACGCCGGCGCCCAGGUGUCCAUCAUGACCUACG |
| | | ACGAGUUCAAGCACUGCUGGGACACCUUCGUGGACCACCAGGGCUGCCCCUUCCAGCCCUGGGACGGCCUGGACGAGCACUCCCA |
| | | GGCCCUGUCCGGCCGGCUGCGGGCCAUCCUGCAGAACCAGGGCAACUCCGGCUCCGAGACCCCCGGCACCUCCGAGUCCGCCACC |
| | | CCCGAGUCCGACAAGAAGUACUCCAUCGGCCUGGCCAUCGGCACCAACUCCGUGGGCUGGGCCGUGAUCACCGACGAGUACAAGG |
| | | UGCCCUCCAAGAAGUUCAAGGUGCUGGGCAACACCGACCGGCACUCCAUCAAGAAGAACCUGAUCGGCGCCCUGCUGUUCGACUC |
| | | CGGCGAGACCGCCGAGGCCACCCGGCUGAAGCGGACCGCCCGGCGGCGGUACACCCGGCGGAAGAACCGGAUCUGCUACCUGCAG |
| | | GAGAUCUUCUCCAACGAGAUGGCCAAGGUGGACGACUCCUUCUUCCACCGGCUGGAGGAGUCCUUCCUGGUGGAGGAGGACAAGA |
| | | AGCACGAGCGGCACCCCAUCUUCGGCAACAUCGUGGACGAGGUGGCCUACCACGAGAAGUACCCCACCAUCUACCACCUGCGGAA |
| | | GAAGCUGGUGGACUCCACCGACAAGGCCGACCUGCGGCUGAUCUACCUGGCCCUGGCCCACAUGAUCAAGUUCCGGGGCCACUUC |
| | | CUGAUCGAGGGCGACCUGAACCCCGACAACUCCGACGUGGACAAGCUGUUCAUCCAGCUGGUGCAGACCUACAACCAGCUGUUCG |
| | | AGGAGAACCCCAUCAACGCCUCCGGCGUGGACGCCAAGGCCAUCCUGUCCGCCCGGCUGUCCAAGUCCCGGCGGCUGGAGAACCU |
| | | GAUCGCCCAGCUGCCCGGCGAGAAGAAGAACGGCCUGUUCGGCAACCUGAUCGCCCUGUCCCUGGGCCUGACCCCCAACUUCAAG |
| | | UCCAACUUCGACCUGGCCGAGGACGCCAAGCUGCAGCUGUCCAAGGACACCUACGACGACGACCUGGACAACCUGCUGGCCCAGA |
| | | UCGGCGACCAGUACGCCGACCUGUUCCUGGCCGCCAAGAACCUGUCCGACGCCAUCCUGCUGUCCGACAUCCUGCGGGUGAACAC |
| | | CGAGAUCACCAAGGCCCCCCUGUCCGCCUCCAUGAUCAAGCGGUACGACGAGCACCACCAGGACCUGACCCUGCUGAAGGCCCUG |
| | | GUGCGGCAGCAGCUGCCCGAGAAGUACAAGGAGAUCUUCUUCGACCAGUCCAAGAACGGCUACGCCGGCUACAUCGACGGCGGCG |
| | | CCUCCCAGGAGGAGUUCUACAAGUUCAUCAAGCCCAUCCUGGAGAAGAUGGACGGCACCGAGGAGCUGCUGGUGAAGCUGAACCG |
| | | GGAGGACCUGCUGCGGAAGCAGCGGACCUUCGACAACGGCUCCAUCCCCCACCAGAUCCACCUGGGCGAGCUGCACGCCAUCCUG |
| | | CGGCGGCAGGAGGACUUCUACCCCUUCCUGAAGGACAACCGGGAGAAGAUCGAGAAGAUCCUGACCUUCCGGAUCCCCUACUACG |
| | | UGGGCCCCCUGGCCCGGGGCAACUCCCGGUUCGCCUGGAUGACCCGGAAGUCCGAGGAGACCAUCACCCCCUGGAACUUCGAGGA |
| | | GGUGGUGGACAAGGGCGCCUCCGCCCAGUCCUUCAUCGAGCGGAUGACCAACUUCGACAAGAACCUGCCCAACGAGAAGGUGCUG |
| | | CCCAAGCACUCCCUGCUGUACGAGUACUUCACCGUGUACAACGAGCUGACCAAGGUGAAGUACGUGACCGAGGGCAUGCGGAAGC |
| | | CCGCCUUCCUGUCCGGCGAGCAGAAGAAGGCCAUCGUGGACCUGCUGUUCAAGACCAACCGGAAGGUGACCGUGAAGCAGCUGAA |
| | | GGAGGACUACUUCAAGAAGAUCGAGUGCUUCGACUCCGUGGAGAUCUCCGGCGUGGAGGACCGGUUCAACGCCUCCCUGGGCACC |
| | | UACCACGACCUGCUGAAGAUCAUCAAGGACAAGGACUUCCUGGACAACGAGGAGAACGAGGACAUCCUGGAGGACAUCGUGCUGA |
| | | CCCUGACCCUGUUCGAGGACCGGGAGAUGAUCGAGGAGCGGCUGAAGACCUACGCCCACCUGUUCGACGACAAGGUGAUGAAGCA |
| | | GCUGAAGCGGCGGCGGUACACCGGCUGGGGCCGGCUGUCCCGGAAGCUGAUCAACGGCAUCCGGGACAAGCAGUCCGGCAAGACC |
| | | AUCCUGGACUUCCUGAAGUCCGACGGCUUCGCCAACCGGAACUUCAUGCAGCUGAUCCACGACGACUCCCUGACCUUCAAGGAGG |
| | | ACAUCCAGAAGGCCCAGGUGUCCGGCCAGGGCGACUCCCUGCACGAGCACAUCGCCAACCUGGCCGGCUCCCCCGCCAUCAAGAA |
| | | GGGCAUCCUGCAGACCGUGAAGGUGGUGGACGAGCUGGUGAAGGUGAUGGGCCGGCACAAGCCCGAGAACAUCGUGAUCGAGAUG |
| | | GCCCGGGAGAACCAGACCACCCAGAAGGGCCAGAAGAACUCCCGGGAGCGGAUGAAGCGGAUCGAGGAGGGCAUCAAGGAGCUGG |
| | | GCUCCCAGAUCCUGAAGGAGCACCCCGUGGAGAACACCCAGCUGCAGAACGAGAAGCUGUACCUGUACUACCUGCAGAACGGCCG |
| | | GGACAUGUACGUGGACCAGGAGCUGGACAUCAACCGGCUGUCCGACUACGACGUGGACCACAUCGUGCCCCAGUCCUUCCUGAAG |
| | | GACGACUCCAUCGACAACAAGGUGCUGACCCGGUCCGACAAGAACCGGGGCAAGUCCGACAACGUGCCCUCCGAGGAGGUGGUGA |
| | | AGAAGAUGAAGAACUACUGGCGGCAGCUGCUGAACGCCAAGCUGAUCACCCAGCGGAAGUUCGACAACCUGACCAAGGCCGAGCG |
| | | GGGCGGCCUGUCCGAGCUGGACAAGGCCGGCUUCAUCAAGCGGCAGCUGGUGGAGACCCGGCAGAUCACCAAGCACGUGGCCCAG |
| | | AUCCUGGACUCCCGGAUGAACACCAAGUACGACGAGAACGACAAGCUGAUCCGGGAGGUGAAGGUGAUCACCCUGAAGUCCAAGC |
| | | UGGUGUCCGACUUCCGGAAGGACUUCCAGUUCUACAAGGUGCGGGAGAUCAACAACUACCACCACGCCCACGACGCCUACCUGAA |
| | | CGCCGUGGUGGGCACCGCCCUGAUCAAGAAGUACCCCAAGCUGGAGUCCGAGUUCGUGUACGGCGACUACAAGGUGUACGACGUG |
| | | CGGAAGAUGAUCGCCAAGUCCGAGCAGGAGAUCGGCAAGGCCACCGCCAAGUACUUCUUCUACUCCAACAUCAUGAACUUCUUCA |
| | | AGACCGAGAUCACCCUGGCCAACGGCGAGAUCCGGAAGCGGCCCCUGAUCGAGACCAACGGCGAGACCGGCGAGAUCGUGUGGGA |
| | | CAAGGGCCGGGACUUCGCCACCGUGCGGAAGGUGCUGUCCAUGCCCCAGGUGAACAUCGUGAAGAAGACCGAGGUGCAGACCGGC |
| | | GGCUUCUCCAAGGAGUCCAUCCUGCCCAAGCGGAACUCCGACAAGCUGAUCGCCCGGAAGAAGGACUGGGACCCCAAGAAGUACG |
| | | GCGGCUUCGACUCCCCCACCGUGGCCUACUCCGUGCUGGUGGUGGCCAAGGUGGAGAAGGGCAAGUCCAAGAAGCUGAAGUCCGU |
| | | GAAGGAGCUGCUGGGCAUCACCAUCAUGGAGCGGUCCUCCUUCGAGAAGAACCCCAUCGACUUCCUGGAGGCCAAGGGCUACAAG |
| | | GAGGUGAAGAAGGACCUGAUCAUCAAGCUGCCCAAGUACUCCCUGUUCGAGCUGGAGAACGGCCGGAAGCGGAUGCUGGCCUCCG |
| | | CCGGCGAGCUGCAGAAGGGCAACGAGCUGGCCCUGCCCUCCAAGUACGUGAACUUCCUGUACCUGGCCUCCCACUACGAGAAGCU |
| | | GAAGGGCUCCCCCGAGGACAACGAGCAGAAGCAGCUGUUCGUGGAGCAGCACAAGCACUACCUGGACGAGAUCAUCGAGCAGAUC |
| | | UCCGAGUUCUCCAAGCGGGUGAUCCUGGCCGACGCCAACCUGGACAAGGUGCUGUCCGCCUACAACAAGCACCGGGACAAGCCCA |
| | | UCCGGGAGCAGGCCGAGAACAUCAUCCACCUGUUCACCCUGACCAACCUGGGCGCCCCCGCCGCCUUCAAGUACUUCGACACCAC |
| | | CAUCGACCGGAAGCGGUACACCUCCACCAAGGAGGUGCUGGACGCCACCCUGAUCCACCAGUCCAUCACCGGCCUGUACGAGACC |
| | | CGGAUCGACCUGUCCCAGCUGGGCGGCGACGGCGGCGGCUCCCCCAAGAAGAAGCGGAAGGUGUCCGAGUCCGCCACCCCCGAGU |
| | | CCGUGUCCGGCUGGCGGCUGUUCAAGAAGAUCUCCUGACUAGCACCAGCCUCAAGAACACCCGAAUGGAGUCUCUAAGCUACAUA |
| | | AUACCAACUUACACUUUACAAAAUGUUGUCCCCCAAAAUGUAGCCAUUCGUAUCUGCUCCUAAUAAAAAGAAAGUUUCUUCACAU |
| | | UCUCUCGAGAAAAAAAAAAAAUGGAAAAAAAAAAAACGGAAAAAAAAAAAAGGUAAAAAAAAAAAAUAUAAAAAAAAAAAACAUA |
| | | AAAAAAAAAAACGAAAAAAAAAAAACGUAAAAAAAAAAAACUCAAAAAAAAAAAAGAUAAAAAAAAAAAACCUAAAAAAAAAAAA |
| | | UGUAAAAAAAAAAAAGGGAAAAAAAAAAAACGCAAAAAAAAAAAACACAAAAAAAAAAAAUGCAAAAAAAAAAAAUCGAAAAAAA |
| | | AAAAAUCUAAAAAAAAAAAACGAAAAAAAAAAAACCCAAAAAAAAAAAAGACAAAAAAAAAAAAUAGAAAAAAAAAAAAGUUAAA |
| | | AAAAAAAAACUGAAAAAAAAAAAAUUUAAAAAAAAAAAAUCUAG |
| | 974 | Not used |
| mRNA encoding UGI | 975 | GGGAGACCCAAGCUGGCUAGCUCCCGCAGUCGGCGUCCAGCGGCUCUGCUUGUUCGUGUGUGUGUCGUUGCAGGCCUUAUUCGGA |
| | | UCCGCCACCAUGGGACCGAAGAAGAAGAGAAAGGUCGGAGGAGGAAGCACAAACCUGUCGGACAUCAUCGAAAAGGAAACAGGAA |
| | | AGCAGCUGGUCAUCCAGGAAUCGAUCCUGAUGCUGCCGGAAGAAGUCGAAGAAGUCAUCGGAAACAAGCCGGAAUCGGACAUCCU |
| | | GGUCCACACAGCAUACGACGAAUCGACAGACGAAAACGUCAUGCUGCUGACAUCGGACGCACCGGAAUACAAGCCGUGGGCACUG |
| | | GUCAUCCAGGACUCGAACGGAGAAAACAAGAUCAAGAUGCUGUGAUAGUCUAGACAUCACAUUUAAAAGCAUCUCAGCCUACCAU |
| | | GAGAAUAAGAGAAAGAAAAUGAAGAUCAAUAGCUUAUUCAUCUCUUUUUCUUUUUCGUUGGUGUAAAGCCAACACCCUGUCUAAA |
| | | AAACAUAAAUUUCUUUAAUCAUUUUGCCUCUUUUCUCUGUGCUUCAAUUAAUAAAAAAUGGAAAGAACCUCGAGUCUAG |
| Exemplary amino acid | 976 | MDGSGGGSPKKKRKVEDKRPAATKKAGQAKKKKGGSGGGEASPASGPRHLMDPHIFTSNFNNGIGRHKTYLCYEVERLDNGTSVK |
| sequence for NLS-NLS- | | MDQHRGFLHNQAKNLLCGFYGRHAELRFLDLVPSLQLDPAQIYRVTWFISWSPCFSWGCAGEVRAFLQENTHVRLRIFAARIYDY |
| APOBEC3A-L070- | | DPLYKEALQMLRDAGAQVSIMTYDEFKHCWDTFVDHQGCPFQPWDGLDEHSQALSGRLRAILQNQGNGTKDSTKDIPETPSKDAA |
| Nme2D16A | | FKPNPINYILGLAIGIASVGWAMVEIDEEENPIRLIDLGVRVFERAEVPKTGDSLAMARRLARSVRRLTRRRAHRLLRARRLLKR |
| | | EGVLQAADFDENGLIKSLPNTPWQLRAAALDRKLTPLEWSAVLLHLIKHRGYLSQRKNEGETADKELGALLKGVANNAHALQTGD |
| | | FRTPAELALNKFEKESGHIRNQRGDYSHTFSRKDLQAELILLFEKQKEFGNPHVSGGLKEGIETLLMTQRPALSGDAVQKMLGHC |
| | | TFEPAEPKAAKNTYTAERFIWLTKLNNLRILEQGSERPLTDTERATLMDEPYRKSKLTYAQARKLLGLEDTAFFKGLRYGKDNAE |
| | | ASTLMEMKAYHAISRALEKEGLKDKKSPLNLSSELQDEIGTAFSLEKTDEDITGRLKDRVQPEILEALLKHISFDKFVQISLKAL |
| | | RRIVPLMEQGKRYDEACAEIYGDHYGKKNTEEKIYLPPIPADEIRNPVVLRALSQARKVINGVVRRYGSPARIHIETAREVGKSF |
| | | KDRKEIEKRQEENRKDREKAAAKFREYFPNFVGEPKSKDILKLRLYEQQHGKCLYSGKEINLVRLNEKGYVEIDHALPFSRTWDD |
| | | SFNNKVLVLGSENQNKGNQTPYEYFNGKDNSREWQEFKARVETSRFPRSKKQRILLQKFDEDGFKECNLNDTRYVNRFLCQFVAD |
| | | HILLTGKGKRRVFASNGQITNLLRGFWGLRKVRAENDRHHALDAVVVACSTVAMQQKITRFVRYKEMNAFDGKTIDKETGKVLHQ |
| | | KTHFPQPWEFFAQEVMIRVFGKPDGKPEFEEADTPEKLRTLLAEKLSSRPEAVHEYVTPLFVSRAPNRKMSGAHKDTLRSAKRFV |
| | | KHNEKISVKRVWLTEIKLADLENMVNYKNGREIELYEALKARLEAYGGNAKQAFDPKDNPFYKKGGQLVKAVRVEKTQESGVLLN |
| | | KKNAYTIADNGDMVRVDVFCKVDKKGKNQYFIVPIYAWQVAENILPDIDCKGYRIDDSYTFCFSLHKYDLIAFQKDEKSKVEFAY |
| | | YINCDSSNGRFYLAWHDKGSKEQQFRISTQNLVLIQKYQVNELGKEIRPCRLKKRPPVR |
| Amino acid sequence | 977 | MSSETGPVAVDPTLRRRIEPHEFEVFEDPRELRKETCLLYEINWGGRHSIWRHTSQNTNKHVEVNFIEKFTTERYFCPNTRCSIT |
| for BE3 | | WFLSWSPCGECSRAITEFLSRYPHVTLFIYIARLYHHADPRNRQGLRDLISSGVTIQIMTEQESGYCWRNFVNYSPSNEAHWPRY |
| | | PHLWVRLYVLELYCIILGLPPCLNILRRKQPQLTFFTIALQSCHYQRLPPHILWATGLKSGSETPGTSESATPESDKKYSIGLAI |
| | | GTNSVGWAVITDEYKVPSKKFKVLGNTDRHSIKKNLIGALLFDSGETAEATRLKRTARRRYTRRKNRICYLQEIFSNEMAKVDDS |
| | | FFHRLEESELVEEDKKHERHPIFGNIVDEVAYHEKYPTIYHLRKKLVDSTDKADLRLIYLALAHMIKFRGHFLIEGDLNPDNSDV |
| | | DKLFIQLVQTYNQLFEENPINASGVDAKAILSARLSKSRRLENLIAQLPGEKKNGLFGNLIALSLGLTPNEKSNFDLAEDAKLQL |
| | | SKDTYDDDLDNLLAQIGDQYADLFLAAKNLSDAILLSDILRVNTEITKAPLSASMIKRYDEHHQDLTLLKALVRQQLPEKYKEIF |
| | | FDQSKNGYAGYIDGGASQEEFYKFIKPILEKMDGTEELLVKLNREDLLRKQRTFDNGSIPHQIHLGELHAILRRQEDFYPFLKDN |
| | | REKIEKILTFRIPYYVGPLARGNSRFAWMTRKSEETITPWNFEEVVDKGASAQSFIERMTNEDKNLPNEKVLPKHSLLYEYFTVY |
| | | NELTKVKYVTEGMRKPAFLSGEQKKAIVDLLEKTNRKVTVKQLKEDYFKKIECFDSVEISGVEDRFNASLGTYHDLLKIIKDKDF |
| | | LDNEENEDILEDIVLTLTLFEDREMIEERLKTYAHLFDDKVMKQLKRRRYTGWGRLSRKLINGIRDKQSGKTILDFLKSDGFANR |
| | | NFMQLIHDDSLTFKEDIQKAQVSGQGDSLHEHIANLAGSPAIKKGILQTVKVVDELVKVMGRHKPENIVIEMARENQTTQKGQKN |
| | | SRERMKRIEEGIKELGSQILKEHPVENTQLQNEKLYLYYLQNGRDMYVDQELDINRLSDYDVDHIVPQSFLKDDSIDNKVLTRSD |
| | | KNRGKSDNVPSEEVVKKMKNYWRQLLNAKLITQRKFDNLTKAERGGLSELDKAGFIKRQLVETRQITKHVAQILDSRMNTKYDEN |
| | | DKLIREVKVITLKSKLVSDFRKDFQFYKVREINNYHHAHDAYLNAVVGTALIKKYPKLESEFVYGDYKVYDVRKMIAKSEQEIGK |
| | | ATAKYFFYSNIMNFFKTEITLANGEIRKRPLIETNGETGEIVWDKGRDFATVRKVLSMPQVNIVKKTEVQTGGFSKESILPKRNS |
| | | DKLIARKKDWDPKKYGGFDSPTVAYSVLVVAKVEKGKSKKLKSVKELLGITIMERSSFEKNPIDFLEAKGYKEVKKDLIIKLPKY |
| | | SLFELENGRKRMLASAGELQKGNELALPSKYVNFLYLASHYEKLKGSPEDNEQKQLFVEQHKHYLDEIIEQISEFSKRVILADAN |
| | | LDKVLSAYNKHRDKPIREQAENIIHLFTLTNLGAPAAFKYFDTTIDRKRYTSTKEVLDATLIHQSITGLYETRIDLSQLGGDSGG |
| | | STNLSDIIEKETGKQLVIQESILMLPEEVEEVIGNKPESDILVHTAYDESTDENVMLLTSDAPEYKPWALVIQDSNGENKIKMLS |
| | | GGSPKKKRKV |
| Amino acid sequence | 978 | MSSETGPVAVDPTLRRRIEPHEFEVFFDPRELRKETCLLYEINWGGRHSIWRHTSQNTNKHVEVNFIEKFTTERYFCPNTRCSIT |
| for BE3 | | WFLSWSPCGECSRAITEFLSRYPHVTLFIYIARLYHHADPRNRQGLRDLISSGVTIQIMTEQESGYCWRNFVNYSPSNEAHWPRY |
| | | PHLWVRLYVLELYCIILGLPPCLNILRRKQPQLTFFTIALQSCHYQRLPPHILWATGLKSGSETPGTSESATPESDKKYSIGLAI |
| | | GTNSVGWAVITDEYKVPSKKFKVLGNTDRHSIKKNLIGALLFDSGETAEATRLKRTARRRYTRRKNRICYLQEIFSNEMAKVDDS |
| | | FFHRLEESFLVEEDKKHERHPIFGNIVDEVAYHEKYPTIYHLRKKLVDSTDKADLRLIYLALAHMIKERGHFLIEGDLNPDNSDV |
| | | DKLFIQLVQTYNQLFEENPINASGVDAKAILSARLSKSRRLENLIAQLPGEKKNGLFGNLIALSLGLTPNEKSNEDLAEDAKLQL |
| | | SKDTYDDDLDNLLAQIGDQYADLELAAKNLSDAILLSDILRVNTEITKAPLSASMIKRYDEHHQDLTLLKALVRQQLPEKYKEIF |
| | | FDQSKNGYAGYIDGGASQEEFYKFIKPILEKMDGTEELLVKLNREDLLRKQRTFDNGSIPHQIHLGELHAILRRQEDFYPFLKDN |
| | | REKIEKILTFRIPYYVGPLARGNSRFAWMTRKSEETITPWNFEEVVDKGASAQSFIERMTNFDKNLPNEKVLPKHSLLYEYETVY |
| | | NELTKVKYVTEGMRKPAFLSGEQKKAIVDLLFKTNRKVTVKQLKEDYFKKIECFDSVEISGVEDRENASLGTYHDLLKIIKDKDE |
| | | LDNEENEDILEDIVLTLTLFEDREMIEERLKTYAHLEDDKVMKQLKRRRYTGWGRLSRKLINGIRDKQSGKTILDFLKSDGFANR |
| | | NFMQLIHDDSLTFKEDIQKAQVSGQGDSLHEHIANLAGSPAIKKGILQTVKVVDELVKVMGRHKPENIVIEMARENQTTQKGQKN |
| | | SRERMKRIEEGIKELGSQILKEHPVENTQLQNEKLYLYYLQNGRDMYVDQELDINRLSDYDVDHIVPQSFLKDDSIDNKVLTRSD |
| | | KNRGKSDNVPSEEVVKKMKNYWRQLLNAKLITQRKFDNLTKAERGGLSELDKAGFIKRQLVETRQITKHVAQILDSRMNTKYDEN |
| | | DKLIREVKVITLKSKLVSDERKDFQFYKVREINNYHHAHDAYLNAVVGTALIKKYPKLESEFVYGDYKVYDVRKMIAKSEQEIGK |
| | | ATAKYFFYSNIMNFFKTEITLANGEIRKRPLIETNGETGEIVWDKGRDFATVRKVLSMPQVNIVKKTEVQTGGESKESILPKRNS |
| | | DKLIARKKDWDPKKYGGFDSPTVAYSVLVVAKVEKGKSKKLKSVKELLGITIMERSSFEKNPIDFLEAKGYKEVKKDLIIKLPKY |
| | | SLFELENGRKRMLASAGELQKGNELALPSKYVNFLYLASHYEKLKGSPEDNEQKQLFVEQHKHYLDEIIEQISEFSKRVILADAN |
| | | LDKVLSAYNKHRDKPIREQAENIIHLFTLTNLGAPAAFKYEDTTIDRKRYTSTKEVLDATLIHQSITGLYETRIDLSQLGGDSGG |
| | | STNLSDIIEKETGKQLVIQESILMLPEEVEEVIGNKPESDILVHTAYDESTDENVMLLTSDAPEYKPWALVIQDSNGENKIKMLS |
| | | GGSPKKKRKV |
| Amino acid sequence | 979 | MEASPASGPRHLMDPHIFTSNENNGIGRHKTYLCYEVERLDNGTSVKMDQHRGELHNQAKNLLCGFYGRHAELRELDLVPSLQLD |
| for BC22 with 2x UGI | | PAQIYRVTWFISWSPCFSWGCAGEVRAFLQENTHVRLRIFAARIYDYDPLYKEALQMLRDAGAQVSIMTYDEFKHCWDTFVDHQG |
| | | CPFQPWDGLDEHSQALSGRLRAILQNQGNSGSETPGTSESATPESDKKYSIGLAIGTNSVGWAVITDEYKVPSKKFKVLGNTDRH |
| | | SIKKNLIGALLFDSGETAEATRLKRTARRRYTRRKNRICYLQEIFSNEMAKVDDSFFHRLEESELVEEDKKHERHPIFGNIVDEV |
| | | AYHEKYPTIYHLRKKLVDSTDKADLRLIYLALAHMIKFRGHFLIEGDLNPDNSDVDKLFIQLVQTYNQLFEENPINASGVDAKAI |
| | | LSARLSKSRRLENLIAQLPGEKKNGLFGNLIALSLGLTPNFKSNEDLAEDAKLQLSKDTYDDDLDNLLAQIGDQYADLFLAAKNL |
| | | SDAILLSDILRVNTEITKAPLSASMIKRYDEHHQDLTLLKALVRQQLPEKYKEIFFDQSKNGYAGYIDGGASQEEFYKFIKPILE |
| | | KMDGTEELLVKLNREDLLRKQRTFDNGSIPHQIHLGELHAILRRQEDFYPFLKDNREKIEKILTFRIPYYVGPLARGNSRFAWMT |
| | | RKSEETITPWNFEEVVDKGASAQSFIERMTNEDKNLPNEKVLPKHSLLYEYFTVYNELTKVKYVTEGMRKPAFLSGEQKKAIVDL |
| | | LFKTNRKVTVKQLKEDYFKKIECFDSVEISGVEDRENASLGTYHDLLKIIKDKDELDNEENEDILEDIVLTLTLFEDREMIEERL |
| | | KTYAHLFDDKVMKQLKRRRYTGWGRLSRKLINGIRDKQSGKTILDELKSDGFANRNFMQLIHDDSLTFKEDIQKAQVSGQGDSLH |
| | | EHIANLAGSPAIKKGILQTVKVVDELVKVMGRHKPENIVIEMARENQTTQKGQKNSRERMKRIEEGIKELGSQILKEHPVENTQL |
| | | QNEKLYLYYLQNGRDMYVDQELDINRLSDYDVDHIVPQSFLKDDSIDNKVLTRSDKNRGKSDNVPSEEVVKKMKNYWRQLLNAKL |
| | | ITQRKFDNLTKAERGGLSELDKAGFIKRQLVETRQITKHVAQILDSRMNTKYDENDKLIREVKVITLKSKLVSDERKDFQFYKVR |
| | | EINNYHHAHDAYLNAVVGTALIKKYPKLESEFVYGDYKVYDVRKMIAKSEQEIGKATAKYFFYSNIMNFFKTEITLANGEIRKRP |
| | | LIETNGETGEIVWDKGRDFATVRKVLSMPQVNIVKKTEVQTGGFSKESILPKRNSDKLIARKKDWDPKKYGGEDSPTVAYSVLVV |
| | | AKVEKGKSKKLKSVKELLGITIMERSSFEKNPIDFLEAKGYKEVKKDLIIKLPKYSLFELENGRKRMLASAGELQKGNELALPSK |
| | | YVNFLYLASHYEKLKGSPEDNEQKQLFVEQHKHYLDEIIEQISEFSKRVILADANLDKVLSAYNKHRDKPIREQAENIIHLETLT |
| | | NLGAPAAFKYFDTTIDRKRYTSTKEVLDATLIHQSITGLYETRIDLSQLGGDSGGSGGSGGSTNLSDIIEKETGKQLVIQESILM |
| | | LPEEVEEVIGNKPESDILVHTAYDESTDENVMLLTSDAPEYKPWALVIQDSNGENKIKMLSGGSGGSGGSTNLSDIIEKETGKQL |
| | | VIQESILMLPEEVEEVIGNKPESDILVHTAYDESTDENVMLLTSDAPEYKPWALVIQDSNGENKIKMLSGGSKRTADGSEFEPKK |
| | | KRKV |
| Amino acid sequence | 980 | MKRTADGSEFESPKKKRKVSSETGPVAVDPTLRRRIEPHEFEVFFDPRELRKETCLLYEINWGGRHSIWRHTSQNTNKHVEVNFI |
| for BE4MAX protein | | EKFTTERYFCPNTRCSITWELSWSPCGECSRAITEFLSRYPHVTLFIYIARLYHHADPRNRQGLRDLISSGVTIQIMTEQESGYC |
| | | WRNFVNYSPSNEAHWPRYPHLWVRLYVLELYCIILGLPPCLNILRRKQPQLTFFTIALQSCHYQRLPPHILWATGLKSGGSSGGS |
| | | SGSETPGTSESATPESSGGSSGGSDKKYSIGLAIGTNSVGWAVITDEYKVPSKKFKVLGNTDRHSIKKNLIGALLEDSGETAEAT |
| | | RLKRTARRRYTRRKNRICYLQEIFSNEMAKVDDSFFHRLEESFLVEEDKKHERHPIFGNIVDEVAYHEKYPTIYHLRKKLVDSTD |
| | | KADLRLIYLALAHMIKFRGHFLIEGDLNPDNSDVDKLFIQLVQTYNQLFEENPINASGVDAKAILSARLSKSRRLENLIAQLPGE |
| | | KKNGLFGNLIALSLGLTPNEKSNEDLAEDAKLQLSKDTYDDDLDNLLAQIGDQYADLFLAAKNLSDAILLSDILRVNTEITKAPL |
| | | SASMIKRYDEHHQDLTLLKALVRQQLPEKYKEIFFDQSKNGYAGYIDGGASQEEFYKFIKPILEKMDGTEELLVKLNREDLLRKQ |
| | | RTFDNGSIPHQIHLGELHAILRRQEDFYPELKDNREKIEKILTFRIPYYVGPLARGNSRFAWMTRKSEETITPWNFEEVVDKGAS |
| | | AQSFIERMTNFDKNLPNEKVLPKHSLLYEYFTVYNELTKVKYVTEGMRKPAFLSGEQKKAIVDLLFKTNRKVTVKQLKEDYFKKI |
| | | ECFDSVEISGVEDRENASLGTYHDLLKIIKDKDFLDNEENEDILEDIVLTLTLFEDREMIEERLKTYAHLEDDKVMKQLKRRRYT |
| | | GWGRLSRKLINGIRDKQSGKTILDELKSDGFANRNFMQLIHDDSLTFKEDIQKAQVSGQGDSLHEHIANLAGSPAIKKGILQTVK |
| | | VVDELVKVMGRHKPENIVIEMARENQTTQKGQKNSRERMKRIEEGIKELGSQILKEHPVENTQLQNEKLYLYYLQNGRDMYVDQE |
| | | LDINRLSDYDVDHIVPQSFLKDDSIDNKVLTRSDKNRGKSDNVPSEEVVKKMKNYWRQLLNAKLITQRKEDNLTKAERGGLSELD |
| | | KAGFIKRQLVETRQITKHVAQILDSRMNTKYDENDKLIREVKVITLKSKLVSDERKDFQFYKVREINNYHHAHDAYLNAVVGTAL |
| | | IKKYPKLESEFVYGDYKVYDVRKMIAKSEQEIGKATAKYFFYSNIMNFFKTEITLANGEIRKRPLIETNGETGEIVWDKGRDFAT |
| | | VRKVLSMPQVNIVKKTEVQTGGFSKESILPKRNSDKLIARKKDWDPKKYGGEDSPTVAYSVLVVAKVEKGKSKKLKSVKELLGIT |
| | | IMERSSFEKNPIDFLEAKGYKEVKKDLIIKLPKYSLFELENGRKRMLASAGELQKGNELALPSKYVNFLYLASHYEKLKGSPEDN |
| | | EQKQLFVEQHKHYLDEIIEQISEFSKRVILADANLDKVLSAYNKHRDKPIREQAENIIHLFTLTNLGAPAAFKYEDTTIDRKRYT |
| | | STKEVLDATLIHQSITGLYETRIDLSQLGGDSGGSGGSGGSTNLSDIIEKETGKQLVIQESILMLPEEVEEVIGNKPESDILVHT |
| | | AYDESTDENVMLLTSDAPEYKPWALVIQDSNGENKIKMLSGGSGGSGGSTNLSDIIEKETGKQLVIQESILMLPEEVEEVIGNKP |
| | | ESDILVHTAYDESTDENVMLLTSDAPEYKPWALVIQDSNGENKIKMLSGGSKRTADGSEFEPKKKRKV** |
| CD30 Construct (DNA) | 981 | ATGGACTTCCAGGTGCAGATCTTCAGCTTCCTGCTGATCAGCGCCAGCGTGATCATGAGCCGGATGGCCCAGGTGCAGCTGCAGC |
| | | AGAGCGGCGCCGAGCTGGCCCGGCCCGGCGCCAGCGTGAAGATGAGCTGCAAGGCCAGCGGCTACACCTTCACCACCTACACCAT |
| | | CCACTGGGTGCGGCGGCGGCCCGGCCACGACCTGGAGTGGATCGGCTACATCAACCCCAGCAGCGGCTGCAGCGACTACAACCAG |
| | | AACTTCAAGGGCAAGACCACCCTGACCGCCGACAAGAGCAGCAACACCGCCTACATGCAGCTGAACAGCCTGACCAGCGAGGACA |
| | | GCGCCGTGTACTACTGCGCCCGGCGGGCCGACTACGGCAACTACGAGTACACCTGGTTCGCCTACTGGGGCCAGGGCACCACCGT |
| | | GACCGTGAGCAGCAGCGGCGGCGGCAGCGGCGGCGGCGGCAGCGGCGGCGGCGGCAGCGTGATCGAGCTGACCCAGAGCCCCAAG |
| | | TTCATGAGCACCAGCGTGGGCGACCGGGTGAACGTGACCTACAAGGCCAGCCAGAACGTGGGCACCAACGTGGCCTGGTTCCAGC |
| | | AGAAGCCCGGCCAGAGCCCCAAGGTGCTGATCTACAGCGCCAGCTACCGGTACAGCGGCGTGCCCGACCGGTTCACCGGCAGCGG |
| | | CAGCGGCACCGACTTCACCCTGACCATCAGCAACGTGCAGAGCGAGGACCTGGCCGAGTACTTCTGCCAGCAGTACCACACCTAC |
| | | CCCCTGACCTTCGGCGGCGGCACCAAGCTGGAGATCAAGCGGAGCGACCCCGCCACCACCACCCCCGCCCCCCGGCCCCCCACCC |
| | | CCGCCCCCACCATCGCCAGCCAGCCCCTGAGCCTGCGGCCCGAGGCCTGCCGGCCCGCCGCCGGCGGCGCCGTGCACACCCGGGG |
| | | CCTGGACTTCGCCTGCGACAAGGACCCCAAGTTCTGGGTGCTGGTGGTGGTGGGCGGCGTGCTGGCCTGCTACAGCCTGCTGGTG |
| | | ACCGTGGCCTTCATCATCTTCTGGGTGCGGAGCAAGCGGAGCCGGCTGCTGCACAGCGACTACATGAACATGACCCCCCGGCGGC |
| | | CCGGCCCCACCCGGAAGCACTACCAGCCCTACGCCCCCCCCCGGGACTTCGCCGCCTACCGGAGCCTGCGGGTGAAGTTCAGCCG |
| | | GAGCGCCGACGCCCCCGCCTACCAGCAGGGCCAGAACCAGCTGTACAACGAGCTGAACCTGGGCCGGCGGGAGGAGTACGACGTG |
| | | CTGGACAAGCGGCGGGGCCGGGACCCCGAGATGGGCGGCAAGCCCCGGCGGAAGAACCCCCAGGAGGGCCTGTACAACGAGCTGC |
| | | AGAAGGACAAGATGGCCGAGGCCTACAGCGAGATCGGCATGAAGGGCGAGCGGCGGCGGGGCAAGGGCCACGACGGCCTGTACCA |
| | | GGGCCTGAGCACCGCCACCAAGGACACCTACGACGCCCTGCACATGCAGGCCCTGCCCCCCCGGTAA |
| CD30 Construct (Amino | 982 | MDFQVQIFSFLLISASVIMSRMAQVQLQQSGAELARPGASVKMSCKASGYTFTTYTIHWVRRRPGHDLEWIGYINPSSGCSDYNQ |
| Acid) | | NFKGKTTLTADKSSNTAYMQLNSLTSEDSAVYYCARRADYGNYEYTWFAYWGQGTTVTVSSSGGGSGGGGSGGGGSVIELTQSPK |
| | | FMSTSVGDRVNVTYKASQNVGTNVAWFQQKPGQSPKVLIYSASYRYSGVPDRFTGSGSGTDFTLTISNVQSEDLAEYFCQQYHTY |
| | | PLTFGGGTKLEIKRSDPATTTPAPRPPTPAPTIASQPLSLRPEACRPAAGGAVHTRGLDFACDKDPKFWVLVVVGGVLACYSLLV |
| | | TVAFIIFWVRSKRSRLLHSDYMNMTPRRPGPTRKHYQPYAPPRDFAAYRSLRVKFSRSADAPAYQQGQNQLYNELNLGRREEYDV |
| | | LDKRRGRDPEMGGKPRRKNPQEGLYNELQKDKMAEAYSEIGMKGERRRGKGHDGLYQGLSTATKDTYDALHMQALPPR* |
| CD30 Construct Signal | 983 | ATGGACTTCCAGGTGCAGATCTTCAGCTTCCTGCTGATCAGCGCCAGCGTGATCATGAGCCGGATGGCC |
| Peptide (DNA) | | |
| CD30 Construct Signal | 984 | MDFQVQIFSELLISASVIMSRMA |
| Peptide (Amino Acid) | | |
| CD30 Construct HRS3 | 985 | CAGGTGCAGCTGCAGCAGAGCGGCGCCGAGCTGGCCCGGCCCGGCGCCAGCGTGAAGATGAGCTGCAAGGCCAGCGGCTACACCT |
| Binder (DNA) | | TCACCACCTACACCATCCACTGGGTGCGGCGGCGGCCCGGCCACGACCTGGAGTGGATCGGCTACATCAACCCCAGCAGCGGCTG |
| | | CAGCGACTACAACCAGAACTTCAAGGGCAAGACCACCCTGACCGCCGACAAGAGCAGCAACACCGCCTACATGCAGCTGAACAGC |
| | | CTGACCAGCGAGGACAGCGCCGTGTACTACTGCGCCCGGCGGGCCGACTACGGCAACTACGAGTACACCTGGTTCGCCTACTGGG |
| | | GCCAGGGCACCACCGTGACCGTGAGCAGCAGCGGCGGCGGCAGCGGCGGCGGCGGCAGCGGCGGCGGCGGCAGCGTGATCGAGCT |
| | | GACCCAGAGCCCCAAGTTCATGAGCACCAGCGTGGGCGACCGGGTGAACGTGACCTACAAGGCCAGCCAGAACGTGGGCACCAAC |
| | | GTGGCCTGGTTCCAGCAGAAGCCCGGCCAGAGCCCCAAGGTGCTGATCTACAGCGCCAGCTACCGGTACAGCGGCGTGCCCGACC |
| | | GGTTCACCGGCAGCGGCAGCGGCACCGACTTCACCCTGACCATCAGCAACGTGCAGAGCGAGGACCTGGCCGAGTACTTCTGCCA |
| | | GCAGTACCACACCTACCCCCTGACCTTCGGCGGCGGCACCAAGCTGGAGATCAAGCGG |
| CD30 Construct HRS3 | 986 | QVQLQQSGAELARPGASVKMSCKASGYTFTTYTIHWVRRRPGHDLEWIGYINPSSGCSDYNQNEKGKTTLTADKSSNTAYMQLNS |
| Binder (Amino Acid) | | LTSEDSAVYYCARRADYGNYEYTWFAYWGQGTTVTVSSSGGGSGGGGSGGGGSVIELTQSPKFMSTSVGDRVNVTYKASQNVGTN |
| | | VAWFQQKPGQSPKVLIYSASYRYSGVPDRFTGSGSGTDFTLTISNVQSEDLAEYFCQQYHTYPLTFGGGTKLEIKR |
| CD30 Construct CD8 | 987 | ACCACCACCCCCGCCCCCCGGCCCCCCACCCCCGCCCCCACCATCGCCAGCCAGCCCCTGAGCCTGCGGCCCGAGGCCTGCCGGC |
| Hinge (DNA) | | CCGCCGCCGGCGGCGCCGTGCACACCCGGGGCCTGGACTTCGCCTGCGAC |
| CD30 Construct CD8 | 988 | TTTPAPRPPTPAPTIASQPLSLRPEACRPAAGGAVHTRGLDFACD |
| Hinge (Amino Acid) | | |
| CD30 Construct CD28 | 989 | TTCTGGGTGCTGGTGGTGGTGGGCGGCGTGCTGGCCTGCTACAGCCTGCTGGTGACCGTGGCCTTCATCATCTTCTGGGTGCGGA |
| TM (DNA) | | GCAAGCGGAGCCGGCTGCTGCACAGCGACTACATGAACATGACCCCCCGGCGGCCCGGCCCCACCCGGAAGCACTACCAGCCCTA |
| | | CGCCCCCCCCCGGGACTTCGCCGCCTACCGGAGC |
| CD30 Construct CD28 | 990 | FWVLVVVGGVLACYSLLVTVAFIIFWVRSKRSRLLHSDYMNMTPRRPGPTRKHYQPYAPPRDFAAYRS |
| TM (Amino Acid) | | |
| CD30 Construct | 991 | CTGCGGGTGAAGTTCAGCCGGAGCGCCGACGCCCCCGCCTACCAGCAGGGCCAGAACCAGCTGTACAACGAGCTGAACCTGGGCC |
| CD3zeta (DNA) | | GGCGGGAGGAGTACGACGTGCTGGACAAGCGGCGGGGCCGGGACCCCGAGATGGGCGGCAAGCCCCGGCGGAAGAACCCCCAGGA |
| | | GGGCCTGTACAACGAGCTGCAGAAGGACAAGATGGCCGAGGCCTACAGCGAGATCGGCATGAAGGGCGAGCGGGGGGGGCAAG |
| | | GGCCACGACGGCCTGTACCAGGGCCTGAGCACCGCCACCAAGGACACCTACGACGCCCTGCACATGCAGGCCCTGCCCCCCCGG |
| CD30 Construct | 992 | LRVKFSRSADAPAYQQGQNQLYNELNLGRREEYDVLDKRRGRDPEMGGKPRRKNPQEGLYNELQKDKMAEAYSEIGMKGERRRGK |
| CD3zeta (Amino Acid) | | GHDGLYQGLSTATKDTYDALHMQALPPR |
| B2M (G000529) | 993 | mG*mG*mC*CACGGAGCGAGACAUCUGUUUUAGAmGmCmUmAmGmAmAmAmUmAmGmCAAGUUAAAAUAAGGCUAGUCCGUUAUC |
| | | AmAmCmUmUmGmAmAmAmAmAmGmUmGmGmCmAmCmCmGmAmGmUmCmGmGmUmGmCmU*mU*mU*mU |
| G021469 TRAC | 994 | mA*mU*mA*mUmCCAmGmAAmCCmCUGACmCCUGmCCGmGUUGmUmAmGmCUCCCmUmGmAmAmAmCmCGUUmGmCUAmCAAU*A |
| | | AGmGmCCmGmUmCmGmAmAmAmGmAmUGUGCmCGmCAAmCGCUCUmGmCCmUmUmCmUGGCAUCG*mU*mU |
| G021475 TRAC | 995 | mA*mA*mC*mCmCUGmAmUCmCUmCUUGUmCCCAmCAGmGUUGmUmAmGmCUCCCmUmGmAmAmAmCmCGUUmGmCUAmCAAU*A |
| | | AGmGmCCmGmUmCmGmAmAmAmGmAmUGUGCmCGmCAAmCGCUCUmGmCCmUmUmCmUGGCAUCG*mU*mU |
| G021481 TRAC | 996 | mG*mC*mC*mGmUGUmAmCCmAGmCUGAGmAGACmUCUmGUUGmUmAmGmCUCCCmUmGmAmAmAmCmCGUUmGmCUAmCAAU*A |
| | | AGmGmCCmGmUmCmGmAmAmAmGmAmUGUGCmCGmCAAmCGCUCUmGmCCmUmUmCmUGGCAUCG*mU*mU |
| G028013 B2M | 997 | mG*mG*mC*CACGGAGCGAGACAUCUGUUUUAGAmGmCmUmAmGmAmAmAmUmAmGmCAAGUUAAAAUAAGGCUAGUCCGUUAUC |
| | | AmAmCmUmUmGmAmAmAmAmAmGmUmGmGmCmAmCmCmGmAmGmUmCmGmGmUmGmCmU*mU*mU*mU |
| G018995 HLA-A | 998 | mA*mC*mA*GCGACGCCGCGAGCCAGGUUUUAGAmGmCmUmAmGmAmAmAmUmAmGmCAAGUUAAAAUAAGGCUAGUCCGUUAUC |
| | | AmAmCmUmUmGmAmAmAmAmAmGmUmGmGmCmAmCmCmGmAmGmUmCmGmGmUmGmCmU*mU*mU*mU |
| G012086 TRAC | 999 | mA*mG*mA*GUCUCUCAGCUGGUACAGUUUUAGAmGmCmUmAmGmAmAmAmUmAmGmCAAGUUAAAAUAAGGCUAGUCCGUUAUC |
| | | AmAmCmUmUmGmAmAmAmAmAmGmUmGmGmCmAmCmCmGmAmGmUmCmGmGmUmGmCmU*mU*mU*mU |
| Guide Scaffold | 3002 | NNNNNNNNNNNNNNNNNNNNGUUUUAGAGCUAGAAAUAGCAAGUUAAAAUAAGGCUAGUCCGUUAUCACGAAAGGGCACCGAGUC |
| | | GGUGCU |
| Guide scaffold | 3003 | mN*mN*mN*NNNNNNNNNNNNNNNNNGUUUUAGAmGmCmUmAmGmAmAmAmUmAmGmCAAGUUAAAAUAAGGCUAGUCCGUUAUC |
| | | ACGAAAGGGCACCGAGUCGGmUmGmC*mU |
| | 3004 | Not Used |
| mRNA sequence | 3005 | GGGAAGCUCAGAAUAAACGCUCAACUUUGGCCGGAUCUGCCACCAUGACCAACCUGUCCGACAUCAUCGAGAAGGAGACCGGCAA |
| encoding UGI | | GCAGCUGGUGAUCCAGGAGUCCAUCCUGAUGCUGCCCGAGGAGGUGGAGGAGGUGAUCGGCAACAAGCCCGAGUCCGACAUCCUG |
| | | GUGCACACCGCCUACGACGAGUCCACCGACGAGAACGUGAUGCUGCUGACCUCCGACGCCCCCGAGUACAAGCCCUGGGCCCUGG |
| | | UGAUCCAGGACUCCAACGGCGAGAACAAGAUCAAGAUGCUGUCCGGCGGCUCCAAGCGGACCGCCGACGGCUCCGAGUUCGAGUC |
| | | CCCCAAGAAGAAGCGGAAGGUGGAGUGAUAGCUAGCACCAGCCUCAAGAACACCCGAAUGGAGUCUCUAAGCUACAUAAUACCAA |
| | | CUUACACUUUACAAAAUGUUGUCCCCCAAAAUGUAGCCAUUCGUAUCUGCUCCUAAUAAAAAGAAAGUUUCUUCACAUUCUCUCG |
| | | AGAAAAAAAAAAAAUGGAAAAAAAAAAAACGGAAAAAAAAAAAAGGUAAAAAAAAAAAAUAUAAAAAAAAAAAACAUAAAAAAAA |
| | | AAAACGAAAAAAAAAAAACGUAAAAAAAAAAAACUCAAAAAAAAAAAAGAUAAAAAAAAAAAACCUAAAAAAAAAAAAUGUAAAA |
| | | AAAAAAAAGGGAAAAAAAAAAAACGCAAAAAAAAAAAACACAAAAAAAAAAAAUGCAAAAAAAAAAAAUCGAAAAAAAAAAAAUC |
| | | UAAAAAAAAAAAACGAAAAAAAAAAAACCCAAAAAAAAAAAAGACAAAAAAAAAAAAUAGAAAAAAAAAAAAGUUAAAAAAAAAA |
| | | AACUGAAAAAAAAAAAAUUUAAAAAAAAAAAAUCUAG |
| Guide scaffold 90-mer | 3006 | GUUUUAGAGCUAGAAAUAGCAAGUUAAAAUAAGGCUAGUCCGUUAUCACGAAAGGGCACCGAGUCGGUGC |
| Guide scaffold 90-mer | 3007 | GUUUUAGAmGmCmUmAmGmAmAmAmUmAmGmCAAGUUAAAAUAAGGCUAGUCCGUUAUCACGAAAGGGCACCGAGUCGG*mU*mG |
| with modification | | *mC |
| Guide scaffold 90-mer | 3008 | GUUUUAGAmGmCmUmAmGmAmAmAmUmAmGmCAAGUUAAAAUAAGGCUAGUCCGUUAUCAmCmGmAmAmAmGmGmGmCmAmCmCm |
| with modification | | GmAmGmUmCmGmG*mU*mG*mC |
| Guide scaffold 88-mer | 3009 | GUUUUAGAmGmCmUmAmGmAmAmAmUmAmGmCAAGUUAAAAUAAGGCUAGUCCGUUAUCAACUUGGCACCGAGUCGG*mU*mG*m |
| with modification | | C |
| Guide scaffold 88-mer | 3010 | GUUUUAGAGCUAGAAAUAGCAAGUUAAAAUAAGGCUAGUCCGUUAUCAAAAUGGCACCGAGUCGGUGC |
| Guide scaffold 88-mer | 3011 | GUUUUAGAmGmCmUmAmGmAmAmAmUmAmGmCAAGUUAAAAUAAGGCUAGUCCGUUAUCAAAAUGGCACCGAGUCGG*mU*mG*m |
| with modification | | C |
| Guide scaffold 88-mer | 3012 | GUUUUAGAmGmCmUmAmGmAmAmAmUmAmGmCAAGUUAAAAUAAGGCUAGUCCGUUAUCAmAmAmAmUmGmGmCmAmCmCmGmAm |
| with modification | | GmUmCmGmG*mU*mG*mC |
| Guide scaffold | 3013 | GUUUUAGAmGmCmUmAmGmAmAmAmUmAmGmCAAGUUAAAAUAAGGCUAGUCCGUUAUCAmAmCmUmUmGmAmAmAmAmAmGmUm |
| | | GmGmCmAmCmCmGmAmGmUmCmGmGmUmGmCmU*mU*mU*mU |
| Guide scaffold | 3014 | mN*mN*mN*NNNNNNNNNNNNNNNNNGUUUUAGAmGmCmUmAmGmAmAmAmUmAmGmCAAGUUAAAAUAAGGCUAGUCCGUUAUC |
| | | AmAmCmUmUmGmAmAmAmAmAmGmUmGmGmCmAmCmCmGmAmGmUmCmGmGmUmGmCmU*mU*mU*mU |
| | 3015-3018 | Not Used |
| G025420 TRAC | 3019 | mC*mU*mC*UCAGCUGGUACACGGCAGUUUUAGAmGmCmUmAmGmAmAmAmUmAmGmCAAGUUAAAAUAAGGCUAGUCCGUUAUC |
| | | ACGAAAGGGCACCGAGUCGGmU*mG*mC*mU |
| B2M (G000529) (full, | 3100 | GGCCACGGAGCGAGACAUCUGUUUUAGAGCUAGAAAUAGCAAGUUAAAAUAAGGCUAGUCCGUUAUCAACUUGAAAAAGUGGCAC |
| unmodified) | | CGAGUCGGUGCUUUU |
| G021469 TRAC (full, | 3101 | AUAUCCAGAACCCUGACCCUGCCGGUUGUAGCUCCCUGAAACCGUUGCUACAAUAAGGCCGUCGAAAGAUGUGCCGCAACGCUCU |
| unmodified) | | GCCUUCUGGCAUCGUU |
| G021475 TRAC (full, | 3102 | AACCCUGAUCCUCUUGUCCCACAGGUUGUAGCUCCCUGAAACCGUUGCUACAAUAAGGCCGUCGAAAGAUGUGCCGCAACGCUCU |
| unmodified) | | GCCUUCUGGCAUCGUU |
| G021481 TRAC (full, | 3103 | GCCGUGUACCAGCUGAGAGACUCUGUUGUAGCUCCCUGAAACCGUUGCUACAAUAAGGCCGUCGAAAGAUGUGCCGCAACGCUCU |
| unmodified) | | GCCUUCUGGCAUCGUU |
| G028013 B2M (full, | 3104 | GGCCACGGAGCGAGACAUCUGUUUUAGAGCUAGAAAUAGCAAGUUAAAAUAAGGCUAGUCCGUUAUCAACUUGAAAAAGUGGCAC |
| unmodified) | | CGAGUCGGUGCUUUU |
| G018995 HLA-A (full, | 3105 | ACAGCGACGCCGCGAGCCAGGUUUUAGAGCUAGAAAUAGCAAGUUAAAAUAAGGCUAGUCCGUUAUCAACUUGAAAAAGUGGCAC |
| unmodified) | | CGAGUCGGUGCUUUU |
| G012086 TRAC (full, | 3106 | AGAGUCUCUCAGCUGGUACAGUUUUAGAGCUAGAAAUAGCAAGUUAAAAUAAGGCUAGUCCGUUAUCAACUUGAAAAAGUGGCAC |
| unmodified) | | CGAGUCGGUGCUUUU |
| G000644 EMX1 target | 3107 | GAGUCCGAGCAGAAGAAGAA |
| sequence | | |
| G000645 VEGFA target | 3108 | GACCCCCUCCACCCCGCCUC |
| sequence | | |
| G000646 RAG1B target | 3109 | GACUUGUUUUCAUUGUUCUC |
| sequence | | |
| G013675 CIITA target | 3110 | CCCCCGGACGGUUCAAGCAA |
| sequence | | |
| G013675 CIITA sgRNA | 3118 | mC*mC*mC*CCGGACGGUUCAAGCAAGUUUUAGAmGmCmUmAmGmAmAmAmUmAmGmCAAGUUAAAAUAAGGCUAGUCCGUUAUC |
| | | AmAmCmUmUmGmAmAmAmAmAmGmUmGmGmCmAmCmCmGmAmGmUmCmGmGmUmGmCmU*mU*mU*mU |

TABLE 9A
VII. Additional Exemplary Nme Guide RNAs

| | | | | | Genomic |
|---|---|---|---|---|---|
| Guide | | Guide | | | Coordinates |
| ID | Target | Sequence | Exemplary Guide RNA Full Sequence | Exemplary Guide RNA Modified Sequence | (hg38) |
| G034202 | HLA-A | GCUCUAU | GCUCUAUCCACGGCGCCCGCGGCUGUUGU | mG*mC*mU*mCmUAUmCmCAmCGmGCGCCmCGCGmGCUmGUUGmUm | chr6: |
| | | CCACGGC | AGCUCCCUGAAACCGUUGCUACAAUAAGG | AmGmCUCCCmUmGmAmAmAmCmCGUUmGmCUAmCAAUAAGmGmCC | 29942891- |
| | | GCCCGCG | CCGUCGAAAGAUGUGCCGCAACGCUCUGC | mGmUmCmGmAmAmAmGmAmUGUGCmCGmCAAmCGCUCUmGmCCmU | 29942915 |
| | | GCU (SEQ | CUUCUGGCAUCGUU (SEQ ID NO: 1576) | mUmCmUGGCAUCG*mU*mU (SEQ ID NO: 3111) | |
| | | ID NO: | | | |
| | | 576) | | | |
| G034617 | HLA-A | CACUCAC | CACUCACCCGCCCAGGUCUGGGUCGUUGU | mC*mA*mC*mUmCACmCmCGmCCmCAGGUmCUGGmGUCmGUUGmUm | chr6: |
| | | CCGCCCA | AGCUCCCUGAAACCGUUGCUACAAUAAGG | AmGmCUCCCmUmGmAmAmAmCmCGUUmGmCUAmCAAUAAGmGmCC | 29942609- |
| | | GGUCUGG | CCGUCGAAAGAUGUGCCGCAACGCUCUGC | mGmUmCmGmAmAmAmGmAmUGUGCmCGmCAAmCGCUCUmGmCCmU | 29942633 |
| | | GUC (SEQ | CUUCUGGCAUCGUU (SEQ ID NO: 1571) | mUmCmUGGCAUCG*mU*mU (SEQ ID NO: 3112) | |
| | | ID NO: | | | |
| | | 571) | | | |
| G028943 | TRAC | AAAACCU | AAAACCUGUCAGUGAUUGGGUUCCGUUGU | mA*mA*mA*mAmCCUmGmUCmAGmUGAUUmGGGUmUCCmGUUGmUm | chr14: |
| | | GUCAGUG | AGCUCCCUGAAACCGUUGCUACAAUAAGG | AmGmCUCCCmUmGmAmAmAmCmCGUUmGmCUAmCAAU*AAGmGmC | 22550574- |
| | | AUUGGG | CCGUCGAAAGAUGUGCCGCAACGCUCUGC | CmGmUmCmGmAmAmAmGmAmUGUGCmCGmCAAmCGCUCUmGmCCm | 22550598 |
| | | UUCC | CUUCUGGCAUCGUU (SEQ ID NO: 1605) | UmUmCmUGGCAUCG*mU*mU (SEQ ID NO: 2605) | |
| | | (SEQ ID | | | |
| | | NO: 605) | | | |
| G034982 | TRAC | AAAACCU | AAAACCUGUCAGUGAUUGGGUUCCGUUGU | mA*mA*mA*mAmCCUmGmUCmAGmUGAUUmGGGUmUCCmGUUGmUm | chr14: |
| | | GUCAGUG | AGCUCCCUGAAACCGUUGCUACAAUAAGG | AmGmCUCCCmUmGmAmAmAmCmCGUUmGmCUAmCAAUAAGmGmCC | 22550574- |
| | | AUUGGG | CCGUCGAAAGAUGUGCCGCAACGCUCUGC | mGmUmCmGmAmAmAmGmAmUGUGCmCGmCAAmCGCUCUmGmCCmU | 22550598 |
| | | UUCC | CUUCUGGCAUCGUU (SEQ ID NO: 1605) | mUmCmUGGCAUCG*mU*mU (SEQ ID NO: 3113) | |
| | | (SEQ ID | | | |
| | | NO: 605) | | | |
| G028939 | TRAC | UUAGGU | UUAGGUUCGUAUCUGUAAAACCAAGUUGU | mU*mU*mA*mGmGUUmCmGUmAUmCUGUAmAAACmCAAmGUUGmU | chr14: |
| | | UCGUAUC | AGCUCCCUGAAACCGUUGCUACAAUAAGG | mAmGmCUCCCmUmGmAmAmAmCmCGUUmGmCUAmCAAU*AAGmGm | 22550544- |
| | | UGUAAA | CCGUCGAAAGAUGUGCCGCAACGCUCUGC | CCmGmUmCmGmAmAmAmGmAmUGUGCmCGmCAAmCGCUCUmGmCC | 22550568 |
| | | ACCAA | CUUCUGGCAUCGUU (SEQ ID NO: 1606) | mUmUmCmUGGCAUCG*mU*mU (SEQ ID NO: 2606) | |
| | | (SEQ ID | | | |
| | | NO: 606) | | | |
| G034981 | TRAC | UUAGGU | UUAGGUUCGUAUCUGUAAAACCAAGUUGU | mU*mU*mA*mGmGUUmCmGUmAUmCUGUAmAAACmCAAmGUUGmU | chr14: |
| | | UCGUAUC | AGCUCCCUGAAACCGUUGCUACAAUAAGG | mAmGmCUCCCmUmGmAmAmAmCmCGUUmGmCUAmCAAUAAGmGmC | 22550544- |
| | | UGUAAA | CCGUCGAAAGAUGUGCCGCAACGCUCUGC | CmGmUmCmGmAmAmAmGmAmUGUGCmCGmCAAmCGCUCUmGmCCm | 22550568 |
| | | ACCAA | CUUCUGGCAUCGUU (SEQ ID NO: 1606) | UmUmCmUGGCAUCG*mU*mU (SEQ ID NO: 3114) | |
| | | (SEQ ID | | | |
| | | NO: 606) | | | |
| G013006 | TRAC | CUCUCAG | CUCUCAGCUGGUACACGGCAGUUUUAGAG | mC*mU*mC*UCAGCUGGUACACGGCAGUUUUAGAmGmCmUmAmGmA | chr14: |
| | | CUGGUAC | CUAGAAAUAGCAAGUUAAAAUAAGGCUAG | mAmAmUmAmGmCAAGUUAAAAUAAGGCUAGUCCGUUAUCAmAmCm | 22547524- |
| | | ACGGCA | UCCGUUAUCAACUUGAAAAAGUGGCACCG | UmUmGmAmAmAmAmAmGmUmGmGmCmAmCmCmGmAmGmUmCmGm | 22547544 |
| | | (SEQ ID | AGUCGGUGCUUUU (SEQ ID NO: 1613) | GmUmGmCmU*mU*mU*mU (SEQ ID NO: 2613) | |
| | | NO: 613) | | | |
| G028986 | TRBC1 | GUGUCCU | GUGUCCUACCAGCAAGGGGUCCUGGUUGU | mG*mU*mG*mUmCCUmAmCCmAGmCAAGGmGGUCmCUGmGUUGmUm | chr7: |
| | | ACCAGCA | AGCUCCCUGAAACCGUUGCUACAAUAAGG | AmGmCUCCCmUmGmAmAmAmCmCGUUmGmCUAmCAAU*AAGmGmC | 142792690- |
| | | AGGGGUC | CCGUCGAAAGAUGUGCCGCAACGCUCUGC | CmGmUmCmGmAmAmAmGmAmUGUGCmCGmCAAmCGCUCUmGmCCm | 142792714 |
| | | CUG (SEQ | CUUCUGGCAUCGUU (SEQ ID NO: 1607) | UmUmCmUGGCAUCG*mU*mU (SEQ ID NO: 2607) | |
| | | ID NO: | | | |
| | | 607) | | | |
| G034618 | TRBC1 | GUGUCCU | GUGUCCUACCAGCAAGGGGUCCUGGUUGU | mG*mU*mG*mUmCCUmAmCCmAGmCAAGGmGGUCmCUGmGUUGmUm | chr7: |
| | | ACCAGCA | AGCUCCCUGAAACCGUUGCUACAAUAAGG | AmGmCUCCCmUmGmAmAmAmCmCGUUmGmCUAmCAAUAAGmGmCC | 142792690- |
| | | AGGGGUC | CCGUCGAAAGAUGUGCCGCAACGCUCUGC | mGmUmCmGmAmAmAmGmAmUGUGCmCGmCAAmCGCUCUmGmCCmU | 142792714 |
| | | CUG (SEQ | CUUCUGGCAUCGUU (SEQ ID NO: 1607) | mUmCmUGGCAUCG*mU*mU (SEQ ID NO: 3115) | |
| | | ID NO: | | | |
| | | 607) | | | |
| G026584 | CIITA | UCAAAGU | UCAAAGUACCCUACAGGAGGACCAGUUGU | mU*mC*mA*mAmAGUmAmCCmCUmACAGGmAGGAmCCAmGUUGmUm | chr16: |
| | | ACCCUAC | AGCUCCCUGAAACCGUUGCUACAAUAAGG | AmGmCUCCCmUmGmAmAmAmCmCGUUmGmCUAmCAAU*AAGmGmC | 10907504- |
| | | AGGAGG | CCGUCGAAAGAUGUGCCGCAACGCUCUGC | CmGmUmCmGmAmAmAmGmAmUGUGCmCGmCAAmCGCUCUmGmCCm | 10907528 |
| | | ACCA | CUUCUGGCAUCGUU (SEQ ID NO: 1608) | UmUmCmUGGCAUCG*mU*mU (SEQ ID NO: 2608) | |
| | | (SEQ ID | | | |
| | | NO: 608) | | | |
| G034201 | CIITA | UCAAAGU | UCAAAGUACCCUACAGGAGGACCAGUUGU | mU*mC*mA*mAmAGUmAmCCmCUmACAGGmAGGAmCCAmGUUGmUm | chr16: |
| | | ACCCUAC | AGCUCCCUGAAACCGUUGCUACAAUAAGG | AmGmCUCCCmUmGmAmAmAmCmCGUUmGmCUAmCAAUAAGmGmCC | 10907504- |
| | | AGGAGG | CCGUCGAAAGAUGUGCCGCAACGCUCUGC | mGmUmCmGmAmAmAmGmAmUGUGCmCGmCAAmCGCUCUmGmCCmU | 10907528 |
| | | ACCA | CUUCUGGCAUCGUU (SEQ ID NO: 1608) | mUmCmUGGCAUCG*mU*mU (SEQ ID NO: 3116) | |
| | | (SEQ ID | | | |
| | | NO: 608) | | | |
| G029131 | CIITA | AGCUGCC | AGCUGCCGUUCUGCCCAGUCCGGGGUUGU | mA*mG*mC*mUmGCCmGmUUmCUmGCCCAmGUCCmGGGmGUUGmUm | chr16: |
| | | GUUCUGC | AGCUCCCUGAAACCGUUGCUACAAUAAGG | AmGmCUCCCmUmGmAmAmAmCmCGUUmGmCUAmCAAU*AAGmGmC | 10906643- |
| | | CCAGUCC | CCGUCGAAAGAUGUGCCGCAACGCUCUGC | CmGmUmCmGmAmAmAmGmAmUGUGCmCGmCAAmCGCUCUmGmCCm | 10906667 |
| | | GGG (SEQ | CUUCUGGCAUCGUU (SEQ ID NO: 1609) | UmUmCmUGGCAUCG*mU*mU (SEQ ID NO: 2609) | |
| | | ID NO: | | | |
| | | 609) | | | |
| G034619 | CIITA | AGCUGCC | AGCUGCCGUUCUGCCCAGUCCGGGGUUGU | mA*mG*mC*mUmGCCmGmUUmCUmGCCCAmGUCCmGGGmGUUGmUm | chr16: |
| | | GUUCUGC | AGCUCCCUGAAACCGUUGCUACAAUAAGG | AmGmCUCCCmUmGmAmAmAmCmCGUUmGmCUAmCAAUAAGmGmCC | 10906643- |
| | | CCAGUCC | CCGUCGAAAGAUGUGCCGCAACGCUCUGC | mGmUmCmGmAmAmAmGmAmUGUGCmCGmCAAmCGCUCUmGmCCmU | 10906667 |
| | | GGG (SEQ | CUUCUGGCAUCGUU (SEQ ID NO: 1609) | mUmCmUGGCAUCG*mU*mU (SEQ ID NO: 3117) | |
| | | ID NO: | | | |
| | | 609) | | | |
| G021557 | VEGFA | GCAUGGG | GCAUGGGCAGGGGCUGGGGUGCACGUUGU | mG*mC*mA*mUmGGGmCmAGmGGmGCUGGmGGUGmCACmGUUGmUm | chr6: |
| | | CAGGGGC | AGCUCCCUGAAACCGUUGCUACAAUAAGG | AmGmCUCCCmUmGmAmAmAmCmCGUUmGmCUAmCAAU*AAGmGmC | 43774288- |
| | | UGGGGU | CCGUCGAAAGAUGUGCCGCAACGCUCUGC | CmGmUmCmGmAmAmAmGmAmUGUGCmCGmCAAmCGCUCUmGmCCm | 43774312 |
| | | GCAC | CUUCUGGCAUCGUU (SEQ ID NO: 1610) | UmUmCmUGGCAUCG*mU*mU (SEQ ID NO: 2610) | |
| | | (SEQ ID | | | |
| | | NO: 610) | | | |
| G021558 | VEGFA | GAAUGGC | GAAUGGCAGGCGGAGGUUGUACUGGUUGU | mG*mA*mA*mUmGGCmAmGGmCGmGAGGUmUGUAmCUGmGUUGmU | chr6: |
| | | AGGCGGA | AGCUCCCUGAAACCGUUGCUACAAUAAGG | mAmGmCUCCCmUmGmAmAmAmCmCGUUmGmCUAmCAAU*AAGmGm | 43780852- |
| | | GGUUGU | CCGUCGAAAGAUGUGCCGCAACGCUCUGC | CCmGmUmCmGmAmAmAmGmAmUGUGCmCGmCAAmCGCUCUmGmCC | 43780876 |
| | | ACUG | CUUCUGGCAUCGUU (SEQ ID NO: 1611) | mUmUmCmUGGCAUCG*mU*mU (SEQ ID NO: 2611) | |
| | | (SEQ ID | | | |
| | | NO: 611) | | | |
| G021567 | VEGFA | GUGAGCA | GUGAGCAGGCACCUGUGCCAACAUGUUGU | mG*mU*mG*mAmGCAmGmGCmACmCUGUGmCCAAmCAUmGUUGmUm | chr6: |
| | | GGCACCU | AGCUCCCUGAAACCGUUGCUACAAUAAGG | AmGmCUCCCmUmGmAmAmAmCmCGUUmGmCUAmCAAU*AAGmGmC | 43781113- |
| | | GUGCCAA | CCGUCGAAAGAUGUGCCGCAACGCUCUGC | CmGmUmCmGmAmAmAmGmAmUGUGCmCGmCAAmCGCUCUmGmCCm | 43781137 |
| | | CAU (SEQ | CUUCUGGCAUCGUU (SEQ ID NO: 1612) | UmUmCmUGGCAUCG*mU*mU (SEQ ID NO: 2612) | |
| | | ID NO: | | | |
| | | 612) | | | |

### VII. EXAMPLES

[0971] The following examples are provided to illustrate certain disclosed embodiments and are not to be construed as limiting the scope of this disclosure in any way.

### Example 1. General Methods

### 1.1. T Cell Culture Media Preparation

[0972] T cell culture media compositions used below are described here. “TCAM Media” comprises of CTS OpTimizer T Cell Expansion SFM containing 2.5% (v/v) of Human AB Serum, 1% (v/v) Glutamax, 1% (v/v) 10 1M HEPES buffer, and 1% of Penicillin-Streptomycin. In addition to the above mentioned components, media was supplemented with 100 U/mL of recombinant human interleukin-2, 5 ng/mL of human interleukin-7, and 5 ng/mL of human interleukin-15.

### 1.2. Preparation of Lipid Nanoparticles

[0973] The lipid components were dissolved in 100% ethanol at various molar ratios. The RNA cargos (e.g., Cas9 mRNA and sgRNA) were dissolved in 25 mM citrate buffer, 100 mM NaCl, pH 5.0, resulting in a concentration of RNA cargo of approximately 0.45 mg/mL.

[0974] The lipid nucleic acid assemblies contained ionizable Lipid A ((9Z,12Z)-3-((4,4-bis(octyloxy)butanoyl)oxy)-2-((((3-(diethylamino)propoxy)carbonyl)oxy)methyl)propyl octadeca-9,12-dienoate, also called 3-((4,4-bis(octyloxy)butanoyl)oxy)-2-((((3-(diethylamino)propoxy)carbonyl)oxy)methyl)propyl (9Z,12Z)-octadeca-9,12-dienoate), Lipid nanoparticles used 35% Lipid A, 47.5% cholesterol, 15% DSPC, and 2.5% PEG2k-DMG by molarity. The lipid nucleic acid assemblies were formulated with a lipid amine to RNA phosphate (N:P) molar ratio of about 6, and a ratio of gRNA to mRNA of 1:2 by weight.

[0975] Lipid nanoparticles (LNP compositions) were prepared using a cross-flow technique utilizing impinging jet mixing of the lipid in ethanol with two volumes of RNA solutions and one volume of water. The lipids in ethanol were mixed through a mixing cross with the two volumes of RNA solution. A fourth stream of water was mixed with the outlet stream of the cross through an inline tee (See WO2016010840 FIG. 2). The LNP compositions were held for 1 hour at room temperature (RT), and further diluted with water (approximately 1:1 v/v). LNP compositions were concentrated using tangential flow filtration on a flat sheet cartridge (Sartorius, 100 kD MWCO) and buffer exchanged using PD-10 desalting columns (GE) into 50 mM Tris, 45 mM NaCl, 5% (w/v) sucrose, pH 7.5 (TSS). Alternatively, the LNP's were optionally concentrated using 100 kDa Amicon spin filter and buffer exchanged using PD-10 desalting columns (GE) into TSS. The resulting mixture was then filtered using a 0.2 μm sterile filter. The final LNP was stored at 4° C. or −80° C. until further use.

1.3. In Vitro Transcription (“IVT”) of mRNA

[0976] Capped and polyadenylated mRNA containing N1-methyl pseudo-U was generated by in vitro transcription using a linearized plasmid DNA template and T7 RNA polymerase. Plasmid DNA containing a T7 promoter, a sequence for transcription, and a polyadenylation sequence was linearized by incubating at 37° C. for 2 hours with XbaI with the following conditions: 200 ng/μL plasmid, 2 U/μL XbaI (NEB), and 1× reaction buffer. The XbaI was inactivated by heating the reaction at 65° C. for 20 min. The linearized plasmid was purified from enzyme and buffer salts. The IVT reaction to generate modified mRNA was performed by incubating 50 ng/L linearized plasmid; 2-5 mM each of GTP, ATP, CTP, and N1-methyl pseudo-UTP (Trilink); 10-25 mM ARCA (Trilink); 5 U/μL T7 RNA polymerase (NEB); 1 U/μL Murine RNase inhibitor (NEB); 0.004 U/μL Inorganic E. coli pyrophosphatase (NEB); and 1× reaction buffer at 37° C. for 1.5-4 hours. TURBO DNase (ThermoFisher) was added to a final concentration of 0.01 U/μL, and the reaction was incubated for an additional 30 minutes to remove the DNA template. The mRNA was purified using a MegaClear Transcription Clean-up kit (ThermoFisher) or a RNeasy Maxi kit (Qiagen) per the manufacturers' protocols. Alternatively, the mRNA was purified through a precipitation protocol, which in some cases was followed by HPLC-based purification. Briefly, after the DNase digestion, mRNA is purified using LiCl precipitation, ammonium acetate precipitation and sodium acetate precipitation. For HPLC purified mRNA, after the LiCl precipitation and reconstitution, the mRNA was purified by RP-IP HPLC (see, e.g., Kariko, et al. Nucleic Acids Research, 2011, Vol. 39, No. 21 e142). The fractions chosen for pooling were combined and desalted by sodium acetate/ethanol precipitation as described above. In an alternative method, mRNA was purified with a LiCl precipitation method followed by further purification by tangential flow filtration. RNA concentrations were determined by measuring the light absorbance at 260 nm (Nanodrop), and transcripts were analyzed by capillary electrophoresis by Bioanlayzer (Agilent).

[0977] S. pyogenes (“Spy”) Cas9 mRNA were generated from plasmid DNA encoding an open reading frame having a nucleic acid sequence of one of SEQ ID NOs: 801-803 and 806 (see sequences in Table 9). When SEQ ID NOs: 801-803 and 806 are referred to below with respect to RNAs, it is understood that Ts should be replaced with Us (which were N1-methyl pseudouridines as described above). Messenger RNAs used in the Examples include a 5′ cap and a 3′ polyadenylation region, e.g., up to 100 nucleotides, and have a nucleic acid sequence of one of SEQ ID NOs: 801-803 and 806 in Table 9.

### Example 2: Screening of HLA-B Guide RNAs with Spy Cas9

[0978] 48 sgRNAs in the 100-nt modified sgRNA format designed for the disruption of the HLA-B gene were screened for efficacy in T cells by assessing loss of HLA-B surface protein. The donor had an HLA-B phenotype of B*07:02 and B*07:02. The percentage of T cells negative for HLA-B7 was determined by flow cytometry following editing at the HLA-B locus by electroporation with Cas9 ribonucleoprotein (RNP) and each test guide.

### 2.1. RNP Electroporation of T Cells

[0979] Cas9 editing activity was assessed using electroporation of Cas9 ribonucleoprotein (RNP). Upon thaw, Pan CD3+ T cells (StemCell, HLA-B*07:02/B*07:02) were plated at a density of 0.5×10\hat{ }6 cells/mL in T cell RPMI media composed of RPMI 1640 (Invitrogen, Cat. 22400-089) containing 5% (v/v) of fetal bovine serum, 1× Glutamax (Gibco, Cat. 35050-061), 50 μM of 2-Mercaptoethanol, 100 μM non-essential amino acids (Invitrogen, Cat. 11140-050), 1 mM sodium pyruvate, 10 mM HEPES buffer, 1% of Penicillin-Streptomycin, and 100 U/mL of recombinant human interleukin-2 (Peprotech, Cat. 200-02). T cells were activated with TransAct™ (1:100 dilution, Miltenyi Biotec). Cells were expanded in T cell RPMI media for 72 hours prior to RNP transfection.

[0980] HLA-B targeting sgRNAs and control B2M and HLA-A targeting sgRNAs were removed from their storage plates and denatured for 2 minutes at 95° C. before cooling at room temperature for 10 minutes. RNP mixture of 20 μM sgRNA and 10 μM Cas9-NLS protein (SEQ ID NO: 800) was prepared and incubated at 25° C. for 10 minutes. Five μL of RNP mixture was combined with 100,000 cells in 20 μL P3 electroporation Buffer (Lonza). 22 μL of RNP/cell mix was transferred to the corresponding wells of a Lonza shuttle 96-well electroporation plate. Cells were electroporated in duplicate with the manufacturer's pulse code. T cell RPMI media was added to the cells immediately post electroporation.

### 2.2. Flow Cytometry

[0981] On day 7 post-edit, T cells were phenotyped by flow cytometry to determine HLA-B protein expression following editing at the HLA-B locus. Briefly, T cells were incubated in antibody targeting HLA-B7, B27 (Miltenyi, Clone REA176, 130-120-234) surface protein corresponding the cells donor's genotype (HLA-B*07:02/B*07:02). Cells were subsequently washed, processed on a Cytoflex flow cytometer (Beckman Coulter) and analyzed using the FlowJo software package. T cells were gated based on size, shape, viability, and HLA-B7 expression. Table 10 and FIG. 1 shows the mean percentage of cells negative for HLA-B7 following editing at the HLA-B locus.

TABLE 10
Mean percentage of T cells HLA-B7 negative
following editing at the HLA-B locus

| Guide ID | Mean % B7− | SD % B7− |
|---|---|---|
| G022020 | 90.55 | 1.767767 |
| G022010 | 74.55 | 0.212132 |
| G022046 | 73.95 | 5.868986 |
| G022043 | 71.65 | 0.777817 |
| G022019 | 60.8 | 2.262742 |
| G022053 | 57.25 | 1.626346 |
| G022011 | 56.4 | 1.131371 |
| G022055 | 52.8 | 0.141421 |
| G022031 | 47.85 | 0.494975 |
| G022027 | 44.55 | 1.06066 |
| G022008 | 39.55 | 3.323402 |
| G022022 | 31.1 | 0.424264 |
| G022015 | 28.65 | 0.919239 |
| G022032 | 23.8 | 7.353911 |
| G022044 | 20.7 | 0.848528 |
| G022039 | 20.65 | 2.899138 |
| G022041 | 17.9 | 1.697056 |
| G022033 | 15.05 | 4.596194 |
| G022017 | 14.8 | 0.848528 |
| G022025 | 13.45 | 1.484924 |
| G022028 | 8.575 | 0.360624 |
| G022050 | 7.73 | 0.028284 |
| G022049 | 7.01 | 0.876812 |
| G022014 | 6.5 | 0.042426 |
| G022030 | 6.37 | 0.579828 |
| G022054 | 6.25 | 0.183848 |
| G022051 | 6.225 | 0.586899 |
| G022018 | 5.83 | 1.06066 |
| G022012 | 5.495 | 0.26163 |
| G022047 | 5.465 | 0.318198 |
| G022048 | 5.44 | 0.028284 |
| G022024 | 4.35 | 1.046518 |
| G022042 | 3.255 | 0.855599 |
| G022034 | 3.07 | 1.499066 |
| G022036 | 2.595 | 0.205061 |
| G022029 | 2.4 | 0.452548 |
| G022026 | 2.08 | 0.692965 |
| G022045 | 1.525 | 0.148492 |
| G022038 | 1.47 | 0.523259 |
| G022035 | 1.34 | 0.39598 |
| G022040 | 1.165 | 0.487904 |
| G022037 | 0.74 | 0.056569 |
| G022021 | 0.64 | 0.155563 |
| G022023 | 0.57 | 0.212132 |
| G022052 | 0.43 | 0.028284 |
| G022013 | 0.41 | 0.028284 |
| G022016 | 0.195 | 0.06364 |
| G022009 | 0.1845 | 0.120915 |

### Example 3: NK Cell Functional Killing Assays

[0982] T cells edited to disrupt HLA-B (G022010 and G022020), HLA-A, or B2M were tested for their ability to resist natural killer (NK) cell mediated killing.

### 3.1 Flow Cytometry

[0983] NK cell mediated cytotoxicity towards engineered T cells was assayed. For this the T cells were co-cultured with the HLA-B/C matched CTV labelled NK cells at effector to target ratios (E:T) of 10:1, 5:1, 2.5:1, 1.25:1 and 0.625:1 for 21 hours. The cells were stained with 7AAD (BD Pharmingen, Cat. 559925), processed on a Cytoflex flow cytometer (Beckman Coulter) and analyzed using the FlowJo software package. T cells were gated based on CTV negativity, size, and shape and viability. Table 11 and FIG. 2 shows the percentage of T cell lysis following NK cell challenge.

TABLE 11
Percentage T cell lysis following NK cell challenge to engineered T cells

| | WT | | HLA-A KO | | HLA-B KO (010) | | HLA-B KO (020) | | B2M KO | |
|---|---|---|---|---|---|---|---|---|---|---|
| E:T | Mean | SD | Mean | SD | Mean | SD | Mean | SD | Mean | SD |
| Basal | 26.90 | 1.13 | 27.55 | 0.21 | 35.20 | 0.14 | 29.95 | 0.49 | 27.75 | 1.06 |
| 0.625 | 20.70 | 0.00 | 22.30 | 0.71 | 31.50 | 0.42 | 25.50 | 0.14 | 42.60 | 0.71 |
| to 1 | | | | | | | | | | |
| 1.25 to | 20.80 | 0.42 | 23.85 | 0.64 | 32.00 | 1.70 | 25.65 | 0.21 | 56.60 | 1.13 |
| 1 | | | | | | | | | | |
| 2.5 to 1 | 21.10 | 0.14 | 25.75 | 0.35 | 33.00 | 1.27 | 28.30 | 0.28 | 78.25 | 1.34 |
| 5 to 1 | 22.25 | 0.49 | 27.40 | 0.28 | 35.05 | 0.92 | 30.40 | 0.14 | 89.19 | 3.66 |
| 10 to 1 | 22.90 | 0.14 | 27.65 | 1.20 | 36.35 | 1.63 | 47.00 | 17.39 | 94.79 | 0.38 |

### Example 4: Off-Target Analysis of HLA-B Human Guides

[0984] Screening for potential off-target genomic sites cleaved by Cas9 targeting HLA-B was performed. (See, e.g., Cameron et al., Nature Methods. 6, 600-606; 2017). In this experiment, 2 sgRNAs targeting human HLA-B and three control guides targeting EMX1, VEGFA, and RAG1B with known off-target profiles were screened using purified genomic DNA from lymphoblast cell line NA24385 (Coriell Institute). Genomic DNA was treated with Quick CIP (NEB M0525) prior to running SITE-Seq. The number of potential off-target sites were detected using a sgRNA as shown in Table 12 at a concentration of 48 nM sgRNA and 16 nM RNP in the biochemical assay. The assay identified potential off-target sites for the sgRNAs tested.

TABLE 12
Off-Target Analysis

| | | | Off- |
|---|---|---|---|
| | | | Target |
| | | Guide Sequence | Site |
| gRNA ID | Target | (SEQ ID NO:) | Count |
| G022010 | HLA-B | AACAAUGCCCACGAUGGGGA | 37 |
| | | (SEQ ID NO: 3) | |
| G022020 | HLA-B | ACAUGCCAUGUACAGCAUGA | 24 |
| | | (SEQ ID NO: 13) | |
| G000644 | EMX1 | GAGUCCGAGCAGAAGAAGAA | 58 |
| | | (SEQ ID NO: 3107) | |
| G000645 | VEGFA | GACCCCCUCCACCCCGCCUC | 793 |
| | | (SEQ ID NO: 3108) | |
| G000646 | RAG1B | GACUUGUUUUCAUUGUUCUC | 47 |
| | | (SEQ ID NO: 3109) | |

[0985] In known off-target detection assays such as the biochemical method used above, a large number of potential off-target sites are typically recovered, by design, so as to “cast a wide net” for potential sites that can be validated in other contexts, e.g., in a primary cell of interest. For example, the biochemical method typically overrepresents the number of potential off-target sites as the assay utilizes purified high molecular weight genomic DNA free of the cell environment and is dependent on the dose of Cas9 RNP used. Accordingly, potential off-target sites identified by these methods may be validated using targeted sequencing of the identified potential off-target sites.

### Example 5: Re-Screening of HLA-B Guide RNAs with Cas9

[0986] 91 sgRNAs in either 100-mer or 91-mer format designed for the disruption of the HLA-B gene were screened for efficacy in T cells by assessing loss of HLA-B surface protein. The donors had an HLA-B phenotype of B*07:02/B*08:01. The percentage of T cells negative for HLA-B7 or HLA-B8 was determined by flow cytometry following editing at the HLA-B locus by HTP-LNP delivery and each test guide.

5.1. Cell Activation and Transfection with HTP-LNP

[0987] One day post thaw, T cells (StemCell, HLA-B*07:02/B*08:01) were plated at a density of 0.5×10\hat{ }6 cells/mL in TCAM media supplemented with cytokines: 100 U/mL of IL-2 (Peprotech, Cat. 200-02), 5 ng/mL of IL-7, and 5 ng/mL of IL-15. T cells were activated with TransAct™ (1:100 dilution, Miltenyi Biotec). HTP-LNPs of each guide or control guide were added to the respective wells in the 96 well-plate at a concentration of 2.5 ug/mL on the cells. A solution of ApoE3 in TCAM was added to all wells to make the final concentration of ApoE3 2.5 μg/mL, and plates were incubated at 37° C. Cell plates were split every 2-3 days and each replicate plate (as well as the original plate) were supplemented with TCAM supplemented with cytokines.

[0988] 8-11 days post transfection with LNPs, plates were spun down for 5 minutes at 500×g, media was aspirated, and cells were stained for flow cytometry readout.

### 5.2. Flow Cytometry

[0989] T cells were resuspended in a master mix of 100 μL of FACS buffer containing a 1:100 v/v solution of antibodies targeting HLA-A2 (Invitrogen, Cat. 17-9876-43), HLA-A3 (Invitrogen, Cat. 12-5754-42), HLA-B7 (Miltenyi, Cat. 130-120-234), or HLA-B8 (Miltenyi, Cat. 130-118-366) corresponding to the cells donor's HLA-A or HLA-B (HLA-B*07:02/B*08:01) genotype. Cells were subsequently washed to remove any excess unbound antibodies and run on a Cytoflex flow cytometer (Beckman Coulter) and analyzed using the FlowJo software package. T cells were gated based on size, shape, viability, and HLA-B7, HLA-B8 expression. Tables 13 and 14 and FIGS. 3A-C and 3D-E show the mean percentage of cells negative for HLA-B following editing at the HLA-B locus.

TABLE 13
Mean percentage of HLA-B knockout across 3 donors in 100-mers plus four 91-mers

| | Donor 2 | | Donor 3 | | Donor 1 | |
|---|---|---|---|---|---|---|
| | Mean % | SD % | Mean % | SD % | Mean % | SD % |
| Guide ID | HLA-B KO | HLA-B KO | HLA-B KO | HLA-B KO | HLA-B KO | HLA-B KO |
| G022008 (100mer) | N/A | N/A | N/A | N/A | N/A | N/A |
| G022009 (100mer) | 0.605 | 0.262 | 1.165 | 0.177 | 1.155 | 0.078 |
| G022010 (100mer) | 72.8 | 0.141 | 76.15 | 6.293 | 74.7 | 0.283 |
| G022011 (100mer) | 37.5 | 0.849 | 11.44 | 3.055 | 19.1 | 2.121 |
| G022012 (100mer) | 4.725 | 0.262 | 6.62 | 2.249 | 3.57 | 0.014 |
| G022013 (100mer) | 0.73 | 0.156 | 2.905 | 0.629 | 0.99 | 0.382 |
| G022014 (100mer) | 5.565 | 1.761 | 7.605 | 1.747 | 3.71 | 0.438 |
| G022015 (100mer) | 0.345 | 0.29 | 1.84 | 1.344 | 0.66 | 0.085 |
| G022016 (100mer) | 0.265 | 0.035 | 2.225 | 1.945 | 0.54 | 0.042 |
| G022017 (100mer) | 5.535 | 1.379 | 10.115 | 1.817 | 2.82 | 0.099 |
| G022018 (100mer) | 4.145 | 0.375 | 6.465 | 1.563 | 3.81 | 0.396 |
| G022019 (100mer) | 44.4 | 1.273 | 47.1 | 3.111 | 38.2 | 1.414 |
| G022020 (100mer) | N/A | N/A | N/A | N/A | N/A | N/A |
| G022021 (100mer) | 0.71 | 0.127 | 2.375 | 0.488 | 1.31 | 0.834 |
| G022022 (100mer) | 14.35 | 1.768 | 20.55 | 4.596 | 9.715 | 0.969 |
| G022023 (100mer) | 2.96 | 2.729 | 6.675 | 4.985 | 0.465 | 0.078 |
| G022024 (100mer) | 3.615 | 0.163 | 7.515 | 0.955 | 3.425 | 0.742 |
| G022025 (100mer) | 14.95 | 1.061 | 20.65 | 5.162 | 15.45 | 0.212 |
| G022026 (100mer) | 2.965 | 0.29 | 3.31 | 0.509 | 0.775 | 0.262 |
| G022027 (100mer) | 36.75 | 2.333 | 8.2 | 2.008 | 25.05 | 2.333 |
| G022028 (100mer) | 8.4 | 1.344 | 14.4 | 3.394 | 7.72 | 0.396 |
| G022029 (100mer) | 5.92 | 0.212 | 10.35 | 0.354 | 5.27 | 0.467 |
| G022030 (100mer) | 6.795 | 1.365 | 10.095 | 1.846 | 6.33 | 0.311 |
| G022031 (100mer) | 43.1 | 1.697 | 43.9 | 0.283 | 21.1 | 2.121 |
| G022032 (100mer) | 27 | 0.99 | 12.85 | 0.212 | 25.1 | 3.394 |
| G022033 (100mer) | 18.35 | 2.333 | 18.85 | 4.313 | 11.7 | 2.121 |
| G022034 (100mer) | 5.22 | 0.354 | 11.195 | 4.108 | 4.785 | 1.28 |
| G022035 (100mer) | 3.165 | 0.021 | 8.795 | 0.983 | 2.585 | 0.785 |
| G022036 (100mer) | 4.37 | 0.99 | 8.395 | 1.110 | 3.5 | 0.792 |
| G022037 (100mer) | 1.905 | 0.177 | 4.58 | 0.580 | 1.53 | 0.014 |
| G022038 (100mer) | 0.305 | 0.035 | 1.01 | 0.042 | 1.05 | 0.82 |
| G022039 (100mer) | 0.315 | 0.035 | 0.76 | 0.226 | 1.115 | 0.926 |
| G022040 (100mer) | 6.35 | 0.552 | 10.12 | 1.103 | 4.965 | 0.177 |
| G022041 (100mer) | 12.25 | 0.636 | 21.05 | 0.919 | 3.36 | 0.368 |
| G022042 (100mer) | 3.34 | 2.164 | 7.72 | 2.051 | 1.875 | 0.29 |
| G022043 (100mer) | 72.4 | 0.424 | 76 | 1.697 | 68.25 | 1.909 |
| G022044 (100mer) | 14.3 | 1.273 | 21.65 | 0.919 | 17.95 | 1.768 |
| G022045 (100mer) | 3.355 | 0.969 | 8.945 | 2.765 | 4.575 | 0.163 |
| G022046 (100mer) | 92.75 | 1.061 | 97.4 | 0.849 | 85.5 | 1.838 |
| G022047 (100mer) | 11.25 | 1.485 | 17.95 | 3.748 | 12.85 | 1.485 |
| G022048 (100mer) | 4.13 | 0.622 | 10.31 | 2.814 | 4.765 | 1.025 |
| G022049 (100mer) | 6.26 | 1.188 | 8.495 | 1.280 | 5.01 | 1.004 |
| G022050 (100mer) | 0.195 | 0.092 | 0.985 | 0.643 | 0.995 | 0.417 |
| G022051 (100mer) | 0.255 | 0.092 | 0.67 | 0.141 | 1.03 | 0.721 |
| G022052 (100mer) | 0.155 | 0.049 | 0.78 | 0.382 | 0.845 | 0.276 |
| G022053 (100mer) | 57.05 | 1.909 | 64.4 | 0.990 | 36.3 | 3.96 |
| G022054 (100mer) | 7.855 | 1.096 | 10.18 | 1.867 | 6.04 | 0.849 |
| G022055 (100mer) | 52.05 | 1.202 | 64.75 | 1.485 | 43.25 | 5.02 |
| G027488 (91mer) | 92.55 | 0.354 | 95.3 | 1.697 | 85.65 | 0.778 |
| G027489 (91mer) | 81.9 | 0.566 | 83.45 | 1.626 | 78.65 | 1.202 |
| G027490 (91mer) | 80.35 | 0.071 | 84.75 | 0.636 | 79.2 | 1.838 |
| G027491 (91mer) | 92 | 1.556 | 95.05 | 0.212 | 84.25 | 0.071 |
| G000529 B2M | 94.7 | 0.283 | 86.9 | 0 | 94.4 | 0.424 |
| G028013 B2M | N/A | N/A | N/A | N/A | 92.95 | 0.919 |
| G018995 HLA-A | 88.4 | 2.828 | N/A | N/A | 90.7 | 0 |
| G012086 TRAC | 97.5 | 0 | 92.4 | 0 | 90.4 | 0.283 |

TABLE 14
Mean percentage of HLA-B knockout
across 2 donors in 91-mer format

| | |
|---|---|
| Donor 3 | Donor 4 |

| | Mean % | SD % | Mean % | SD % |
|---|---|---|---|---|
| | HLA-B | HLA-B | HLA-B | HLA-B |
| Guide ID | KO | KO | KO | KO |
| G027488 (91mer) | 72.4 | 3.536 | 72.85 | 1.909 |
| G027488 (91mer) | 77.35 | 0.495 | 77.85 | 0.778 |
| G027491 (91mer) | 73.35 | 2.475 | 76.15 | 4.172 |
| G027973 (91mer) | 78.6 | 2.687 | 88.1 | 3.111 |
| G027974 (91mer) | 72.2 | 1.414 | 87.55 | 4.596 |
| G027975 (91mer) | 74.2 | 2.687 | 69.95 | 1.202 |
| G027976 (91mer) | 76.05 | 2.192 | 81.4 | 0.424 |
| G027977 (91mer) | 12.65 | 15.203 | 1.415 | 0.898 |
| G027978 (91mer) | 67.65 | 1.344 | 63.2 | 3.96 |
| G027979 (91mer) | 6.46 | 2.093 | 5.725 | 0.007 |
| G027980 (91mer) | 8.945 | 0.856 | 5.51 | 1.471 |
| G027981 (91mer) | 41.9 | 8.202 | 30.95 | 3.889 |
| G027982 (91mer) | 2.28 | 0.566 | 0.875 | 0.134 |
| G027983 (91mer) | 23.05 | 0.495 | 22.6 | 4.525 |
| G027984 (91mer) | 82.85 | 1.485 | 76.95 | 4.313 |
| G027985 (91mer) | 91.5 | 0.99 | 88.45 | 7.566 |
| G027986 (91mer) | 48.2 | 2.404 | 48.9 | 0.283 |
| G027987 (91mer) | 77.3 | 1.131 | 78.05 | 0.636 |
| G027988 (91mer) | 81.2 | 1.414 | 81.3 | 1.556 |
| G027989 (91mer) | 79.65 | 3.748 | 76.3 | 4.243 |
| G027990 (91mer) | 87.75 | 1.061 | 88.1 | 0.283 |
| G027991 (91mer) | 80.45 | 4.313 | 83 | 2.546 |
| G027992 (91mer) | 33.75 | 24.961 | 9.25 | 1.768 |
| G027993 (91mer) | 75.85 | 1.202 | 76.5 | 1.273 |
| G027994 (91mer) | 90.05 | 0.354 | 93.45 | 1.768 |
| G027995 (91mer) | 17.4 | 14.001 | 16.3 | 3.677 |
| G027996 (91mer) | 63.75 | 0.636 | 62.05 | 0.778 |
| G027997 (91mer) | 43.7 | 4.101 | 39.8 | 2.121 |
| G027998 (91mer) | 58.35 | 1.061 | 63.2 | 3.96 |
| G027999 (91mer) | 3.78 | 0.424 | 1.77 | 0.24 |
| G028000 (91mer) | 75.3 | 0 | 72.2 | 0.849 |
| G028001 (91mer) | 83.85 | 1.344 | 85.8 | 0.141 |
| G028002 (91mer) | 88.6 | 0.99 | 95.3 | 0.283 |
| G028003 (91mer) | 57.45 | 3.182 | 50.9 | 2.121 |
| G028004 (91mer) | 31.75 | 5.162 | 29.25 | 1.061 |
| G028005 (91mer) | 10.13 | 1.937 | 5.19 | 0.75 |
| G028006 (91mer) | 67.95 | 0.778 | 69.8 | 1.273 |
| G028007 (91mer) | 34.5 | 18.95 | 14.1 | 1.556 |
| G028008 (91mer) | 60.35 | 34.578 | 83.75 | 1.768 |
| G028009 (91mer) | 46.9 | 0.283 | 49.9 | 3.96 |
| G028010 (91mer) | 77.7 | 2.687 | 78.5 | 3.96 |
| G028011 (91mer) | 3.675 | 0.247 | 97.15 | 0.212 |
| G000529 B2M | 94.4 | 0.424 | N/A | N/A |
| G028013 B2M | 92.95 | 0.919 | 96.85 | 0.636 |
| G018995 HLA-A | 90.7 | 0 | N/A | N/A |
| G012086 TRAC | 90.4 | 0.283 | N/A | N/A |

### Example 6: LNP Dose Response Curves for Top HLA-B Spy Cleavase Guides

### 6.1 T Cell Preparation

[0990] One day post thaw, T cells (Cellex, HLA-B*07:02/B*08:01) were plated at a density of 0.5×10\hat{ }6 cells/mL in TCAM media supplemented with 2× cytokines: 200 U/mL of IL-2 (Peprotech, Cat. 200-02), 10 ng/mL of IL-7, and 10 ng/mL of IL-15. T cells were activated with TransAct™ (1:100 dilution, Miltenyi Biotec). TCAM Media containing 4× ApoE3 (10 ug/mL) was prepared and filled in a reservoir for the Hamilton. To “Column 1” of a Hamilton compatible deep well dilution block, a 1 mL 4× stock solution (20 μg/mL) of each HLA-B LNP in TCAM (for guides G027488, G027489, G027490, G027491) was added in duplicates, according to the plate layout. Transfection was performed on Hamilton by diluting the LNP stock and ApoE3 media 4-fold to generate the highest point in the standard curve (5 ug/mL LNP), followed by a 2-fold serial dilution to obtain a 12-point DRC. The ApoE3 concentration was kept constant at 2.5 μg/mL in each well. The total volume of LNP+ ApoE3 media added to each well by the Hamilton to get the desired concentrations was 100 μL. Transfection of the B2M LNP was performed manually without the Hamilton, by adding B2M LNP to the cells at a concentration of 2.5 μg/mL and ApoE3 at a concentration of 2.5 ug/mL in TCAM. It is to be noted that since cells were plated with 2× cytokines, LNP and ApoE3 containing media was cytokine free to result in a 1× final concentration of cytokines on the cells (100 U/mL of IL-2 (Peprotech, Cat. 200-02), 5 ng/mL of IL-7, and 5 ng/mL of IL-15). Plates were transferred to at 37° C. incubator. Cell plates were split every 2-3 days and each replicate plate (as well as the original plate) were supplemented with TCAM supplemented with cytokines.
[0991] 9 days post transfection with LNPs, plates were spun down for 5 minutes at 500×g, media was aspirated, and cells were stained for flow cytometry readout.

### 6.2 Flow Cytometry

[0992] Flow cytometry was performed as in Example 5.2. Tables 15 and 16 and FIGS. 4A and 4B show the percent knockout at each LNP dose.

TABLE 15

| | G027488 | | | G027489 | | | G027490 | | |
|---|---|---|---|---|---|---|---|---|---|
| | Mean % | SD % | | Mean % | SD % | | Mean % | SD % | |
| Guide | HLA- | HLA- | | HLA- | HLA- | | HLA- | HLA- | |
| sgRNA | B*07:02 | B*07:02 | | B*07:02 | B*07:02 | | B*07:02 | B*07:02 | |
| (μg/mL) | KO | KO | N | KO | KO | N | KO | KO | N |
| 5 | 81.20 | 1.27 | 2 | 85.25 | 1.63 | 2 | 64.65 | 1.06 | 2 |
| 2.5 | 83.80 | 2.12 | 2 | 88.30 | 1.41 | 2 | 63.50 | 2.40 | 2 |
| 1.25 | 88.25 | 0.21 | 2 | 87.20 | 1.70 | 2 | 65.35 | 1.48 | 2 |
| 0.625 | 89.65 | 0.92 | 2 | 87.05 | 0.49 | 2 | 64.65 | 3.89 | 2 |
| 0.313 | 77.35 | 0.64 | 2 | 86.15 | 0.35 | 2 | 66.15 | 3.32 | 2 |
| 0.156 | 14.25 | 0.78 | 2 | 70.05 | 1.91 | 2 | 62.70 | 1.41 | 2 |
| 0.078 | 1.13 | 0.37 | 2 | 32.60 | 0.42 | 2 | 36.60 | 4.95 | 2 |
| 0.039 | 0.53 | 0.44 | 2 | 5.92 | 0.22 | 2 | 8.01 | 3.52 | 2 |
| 0.02 | 0.22 | 0.21 | 2 | 1.02 | 0.01 | 2 | 1.90 | 0.07 | 2 |
| 0.01 | 0.62 | 0.16 | 2 | 0.33 | 0.04 | 2 | 0.40 | 0.11 | 2 |
| 0.005 | 0.38 | 0.06 | 2 | 0.31 | 0.00 | 2 | 0.29 | 0.18 | 2 |
| 0.002 | 0.28 | 0.10 | 2 | 0.12 | 0.00 | 2 | 0.13 | 0.01 | 2 |

| | G027491 | | | G000529 B2M | | |
|---|---|---|---|---|---|---|
| | Mean % | SD % | | Mean % | SD % | |
| Guide | HLA- | HLA- | | HLA- | HLA- | |
| sgRNA | B*07:02 | B*07:02 | | B*07:02 | B*07:02 | |
| (μg/mL) | KO | KO | N | KO | KO | N |
| 5 | 76.25 | 2.47 | 2 | | | |
| 2.5 | 79.80 | 0.14 | 2 | | | |
| 1.25 | 87.00 | 0.71 | 2 | 93.5 | | 1 |
| 0.625 | 86.95 | 0.92 | 2 | | | |
| 0.313 | 54.70 | 3.54 | 2 | | | |
| 0.156 | 4.28 | 0.53 | 2 | | | |
| 0.078 | 0.33 | 0.01 | 2 | | | |
| 0.039 | 0.14 | 0.01 | 2 | | | |
| 0.02 | 0.13 | 0.00 | 2 | | | |
| 0.01 | 0.13 | 0.03 | 2 | | | |
| 0.005 | 0.10 | 0.00 | 2 | | | |
| 0.002 | 0.22 | 0.11 | 2 | | | |

TABLE 16

| | G027488 | | | G027489 | | | G027490 | | |
|---|---|---|---|---|---|---|---|---|---|
| | Mean % | SD % | | Mean % | SD % | | Mean % | SD % | |
| Guide | HLA- | HLA- | | HLA- | HLA- | | HLA- | HLA- | |
| sgRNA | B*08:01 | B*08:01 | | B*08:01 | B*08:01 | | B*08:01 | B*08:01 | |
| (μg/mL) | KO | KO | N | KO | KO | N | KO | KO | N |
| 5 | 78.45 | 2.05 | 2 | 85.20 | 0.14 | 2 | 74.05 | 2.19 | 2 |
| 2.5 | 82.20 | 1.27 | 2 | 83.80 | 0.14 | 2 | 72.75 | 0.49 | 2 |
| 1.25 | 86.25 | 0.07 | 2 | 84.10 | 0.28 | 2 | 73.35 | 1.91 | 2 |
| 0.625 | 89.00 | 0.71 | 2 | 84.45 | 0.78 | 2 | 75.60 | 2.12 | 2 |
| 0.313 | 84.05 | 1.63 | 2 | 84.75 | 0.92 | 2 | 75.20 | 1.27 | 2 |
| 0.156 | 25.45 | 3.89 | 2 | 71.80 | 2.40 | 2 | 71.60 | 1.41 | 2 |
| 0.078 | 1.64 | 0.35 | 2 | 44.30 | 3.39 | 2 | 59.25 | 1.91 | 2 |
| 0.039 | 0.61 | 0.22 | 2 | 10.30 | 1.00 | 2 | 21.55 | 0.21 | 2 |
| 0.02 | 0.47 | 0.18 | 2 | 1.88 | 0.23 | 2 | 4.84 | 0.59 | 2 |
| 0.01 | 0.48 | 0.20 | 2 | 0.90 | 0.02 | 2 | 1.98 | 0.35 | 2 |
| 0.005 | 0.61 | 0.11 | 2 | 0.81 | 0.04 | 2 | 1.02 | 0.22 | 2 |
| 0.002 | 0.76 | 0.11 | 2 | 1.37 | 0.65 | 2 | 1.36 | 0.76 | 2 |

| | G027491 | | | G000529 B2M | | |
|---|---|---|---|---|---|---|
| | Mean % | SD % | | Mean % | SD % | |
| Guide | HLA- | HLA- | | HLA- | HLA- | |
| sgRNA | B*08:01 | B*08:01 | | B*08:01 | B*08:01 | |
| (μg/mL) | KO | KO | N | KO | KO | N |
| 5 | 71.25 | 0.49 | 2 | | | |
| 2.5 | 79.45 | 0.21 | 2 | | | |
| 1.25 | 81.10 | 4.24 | 2 | 96.6 | | 1 |
| 0.625 | 84.00 | 1.84 | 2 | | | |
| 0.313 | 66.45 | 1.06 | 2 | | | |
| 0.156 | 10.75 | 0.64 | 2 | | | |
| 0.078 | 1.24 | 0.27 | 2 | | | |
| 0.039 | 0.73 | 0.08 | 2 | | | |
| 0.02 | 1.09 | 0.52 | 2 | | | |
| 0.01 | 0.95 | 0.23 | 2 | | | |
| 0.005 | 0.78 | 0.25 | 2 | | | |
| 0.002 | 0.72 | 0.13 | 2 | | | |

### Example 7: Screening of HLA-B Guides with Nme2 BC22n and Nme2 Cleavase

[0993] 57 sgRNAs targeting HLA-B were screened at a fixed concentration of 100 μM. sgRNAs targeting TRAC and B2M were used as controls. Guides were either electroporated with mRNA encoding UGI (3490 ng/mL) (SEQ ID NO: 821) as well as either mRNA encoding Nme2 BC22n (1709 ng/mL) (SEQ ID NO: 822), an mRNA encoding Nme2-cleavase (1660 ng/mL) (SEQ ID NO: 825), or an mRNA encoding Spy-cleavase (2230 ng/mL) (SEQ ID NO: 827).

7.1 T cell Preparation

[0994] Healthy human donor apheresis was obtained commercially (Hemacare), and cells were washed and resuspended in in CliniMACS® PBS/EDTA buffer (Miltenyi Biotec Cat. 130-070-525) and processed in a MultiMACS™ Cell 24 Separator Plus device (Miltenyi Biotec). T cells were isolated via positive selection using a Straight from Leukopak® CD4/CD8 MicroBead kit, human (Miltenyi Biotec Cat. 130-122-352). T cells were aliquoted and cryopreserved for future use in Cryostor® CS10 (StemCell Technologies Cat. 07930). Upon thaw, T cells were plated at a density of 1.0×10⁶ cells/mL in T cell growth media (TCGM) composed of CTS OpTmizer T Cell Expansion SFM and T Cell Expansion Supplement (ThermoFisher Cat. A1048501) containing 5% human AB serum (GeminiBio, Cat. 100-512), 1× Penicillin-Streptomycin, 1× Glutamax, 10 mM HEPES, 1× cytokines (200 U/mL recombinant human interleukin-2 (Peprotech, Cat. 200-02), 5 ng/mL recombinant human interleukin 7 (Peprotech, Cat. 200-07), and 5 ng/mL recombinant human interleukin 15 (Peprotech, Cat. 200-15)). T cells were rested in the T cell growth media for 24 hours at which time they were activated with TransAct™ (1:100 dilution, Miltenyi Biotec, Cat. 130-111-160). T cells were activated 48 hours prior to electroporation.

7.2 T Cell Editing with RNA Electroporation

[0995] T cells were edited at the HLA-B locus with Cas9 (SEQ ID NO: 827), mRNA encoding Nine BC22n (SEQ ID NO: 822) and UGI (SEQ ID NO: 821) to assess sgRNA editing efficacy and the corresponding loss of HLA-B7 expression.

[0996] A solution containing mRNA encoding BC22n (SEQ ID: 822) and UGI (SEQ ID NO: 821) was prepared in P3 electroporation buffer (Lonza Catalog #V4SP-3960). 100 μM HLA-B targeting sgRNAs included in Table 17 were removed from their storage plates and denatured for 2 minutes at 95° C. and incubated at room temperature for 5 minutes. Forty-eight hours post activation, T cells were harvested, centrifuged at 500 g for 5 minutes, and resuspended at a concentration of 12.5×10⁶ T cells/mL in P3 electroporation buffer (Lonza Catalog #V4SP-3960). For each well to be electroporated, 1×10⁵ T cells were mixed with 20 ng/μL of BC22n mRNAs, 20 ng/μL of UGI mRNA and 20 pmols of sgRNA in a final volume of 20 μL of P3 electroporation buffer. This mix was transferred in duplicate to a 96-well Nucleofector™ plate (manufacturer, catalog #) and electroporated using manufacturer's pulse code. Electroporated T cells were immediately rested in 80 μL of CTS Optimizer T cell growth media (manufacturer, catalog #) without cytokines for 15 minutes. After resting, T cells were transferred to flat-bottom 96-well plates (manufacturer, catalog #) containing 80 μL of CTS Optimizer T cell growth media (manufacturer, catalog #) supplemented with 2× cytokines (200 U/mL recombinant human interleukin-2 (Peprotech, Cat. 200-02), 5 ng/mL recombinant human interleukin-7 (Peprotech, Cat. 200-07), and 5 ng/mL recombinant human interleukin-15 (Peprotech, Cat. 200-15) per well. The plates were incubated at 37° C. for 10 days.

[0997] On day 7 post-electroporation, cells were collected for flow cytometry analysis. NGS analysis of cells was run by a third-party facility using standard methods.

### 7.3 Flow Cytometry

[0998] T cells were phenotyped by flow cytometry to determine HLA-B7 protein expression. Briefly, T cells were incubated for 30 min at 4° C. with a mixture of antibodies against CD3 (BioLegend, Cat. No. 316314), CD4 (BioLegend, Cat. No. 317434), CD8 (BioLegend, Cat. No. 301046), Viakrome (Immunotech, Cat. No. C36628), HLA B7 (Milteny Biotech, Cat. No. 130-120-234) diluted at 1:200 in cell staining buffer. Cells were subsequently washed and resuspended in 100 μL of cell staining buffer. Cells were then processed on a Cytoflex flow cytometer (Beckman Coulter) and analyzed using the FlowJo software package. T cells were gated based on size, shape, viability, CD8, CD3, and HLA-B7 expression. Table 17 and FIG. 5A shows the mean percentage of cells negative for HLA-B7 following editing at the HLA-B locus.

TABLE 17
Mean % HLA-B7 T cells following editing at the HLA-B locus.

| | % HLA-B7-ve | | | Guide | % HLA-B7-ve | | |
|---|---|---|---|---|---|---|---|
| Guide ID | Mean | SD | N | ID | Mean | SD | N |
| G018995 | 0.27 | 0.170 | 2 | G028828 | 2.13 | 0.834 | 2 |
| HLA-A | | | | | | | |
| G021469 | 0.08 | 0.000 | 2 | G028829 | 3.375 | 0.940 | 2 |
| TRAC | | | | | | | |
| G021481 | 1.38 | 1.796 | 2 | G028830 | 0.32 | 0.297 | 2 |
| TRAC | | | | | | | |
| G028789 | 49.05 | 1.202 | 2 | G028831 | 32.05 | 0.636 | 2 |
| G028790 | 1.295 | 0.672 | 2 | G028832 | 74.9 | 9.334 | 2 |
| G028791 | 11.075 | 1.591 | 2 | G028833 | 7.215 | 5.353 | 2 |
| G028792 | 0.36 | 0.085 | 2 | G028834 | 0.27 | 0.198 | 2 |
| G028793 | 0.31 | 0.297 | 2 | G028835 | 0.185 | 0.078 | 2 |
| G028794 | 4.295 | 0.530 | 2 | G028836 | 0.415 | 0.120 | 2 |
| G028795 | 71.3 | 6.505 | 2 | G028837 | 0.29 | 0.099 | 2 |
| G028796 | 16.425 | 10.713 | 2 | G028838 | 0.45 | 0.042 | 2 |
| G028797 | 0.51 | 0.113 | 2 | G028839 | 6.69 | 0.990 | 2 |
| G028798 | 0.08 | 0.057 | 2 | G028840 | 2.1 | 0.594 | 2 |
| G028799 | 1.795 | 0.035 | 2 | G028841 | 0.135 | 0.106 | 2 |
| G028800 | 0.12 | 0.071 | 2 | G028842 | 0.06 | 0.042 | 2 |
| G028801 | 0.335 | 0.148 | 2 | G028843 | 0.185 | 0.035 | 2 |
| G028802 | 24.45 | 2.899 | 2 | G028931 | 0.065 | 0.035 | 2 |
| G028803 | 42.25 | 3.465 | 2 | G028932 | 0.12 | 0.028 | 2 |
| G028804 | 7.695 | 2.397 | 2 | | | | |
| G028805 | 9.915 | 0.686 | 2 | | | | |
| G028806 | 18.15 | 0.495 | 2 | | | | |
| G028807 | 4.615 | 0.742 | 2 | | | | |
| G028808 | 0.37 | 0.240 | 2 | | | | |
| G028809 | 0.03 | 0.000 | 2 | | | | |
| G028810 | 0.055 | 0.035 | 2 | | | | |
| G028811 | 0.24 | 0.156 | 2 | | | | |
| G028812 | 0.035 | 0.035 | 2 | | | | |
| G028813 | 1.625 | 0.134 | 2 | | | | |
| G028814 | 3.495 | 0.672 | 2 | | | | |
| G028815 | 12.2 | 0.849 | 2 | | | | |
| G028816 | 13.5 | 0.424 | 2 | | | | |
| G028817 | 1.52 | 0.778 | 2 | | | | |
| G028818 | 0.92 | 1.273 | 2 | | | | |
| G028819 | 0.1 | 0.014 | 2 | | | | |
| G028820 | 0.365 | 0.346 | 2 | | | | |
| G028821 | 0.085 | 0.007 | 2 | | | | |
| G028822 | 0.185 | 0.035 | 2 | | | | |
| G028823 | 1.49 | 0.071 | 2 | | | | |
| G028824 | 0.215 | 0.247 | 2 | | | | |
| G028825 | 1.585 | 0.205 | 2 | | | | |
| G028826 | 0.825 | 0.035 | 2 | | | | |
| G028827 | 0.605 | 0.375 | 2 | | | | |

### 7.4 Nme2 Cleavase Screen

[0999] 55 sgRNAs targeting HLA-B were screened at a fixed concentration of 100 μM. Three sgRNAs targeting TRAC and a sgRNA targeting B2M were used as controls. The donors had an HLA-B phenotype of B*07:02/B*08:01. The percentage of T cells negative for HLA-B7 or HLA-B8 was determined by flow cytometry following editing at the HLA-B locus by HTP-LNP delivery and each test guide.

[1000] T cells were transfected with HTP-LNP and flow cytometry was performed as in Example 5. Table 18 and FIGS. 5B and 5C show the mean percentage of knockout for HLA*B07:02 or HLAB*08:01.

TABLE 18
Mean percentage HLA-B*07:02 or HLA-B*08:01 knockout
following editing at the HLA-B locus

| | % HLA-B*07:02 KO | % HLA-B*08:01 KO |
|---|---|---|
| Guide ID | Mean | Mean |
| G000529 B2M | 93.25 | 92.95 |
| G028789 | 55.5 | 49.8 |
| G028790 | 1.08 | 0.68 |
| G028791 | 8.05 | 7.22 |
| G028792 | 1.73 | 1.39 |
| G028793 | 0.65 | 0.26 |
| G028794 | 10.8 | 11.6 |
| G028795 | 7.24 | 5.67 |
| G028796 | 3.45 | 2.88 |
| G028797 | 0.43 | 0.16 |
| G028798 | 1.69 | 0.22 |
| G028799 | 1.05 | 1.05 |
| G028800 | 0.67 | 0.44 |
| G028801 | 1.21 | 0.48 |
| G028802 | 5.09 | 9.4 |
| G028803 | 3.36 | 3.46 |
| G028804 | 0.44 | 0.13 |
| G028805 | 95.6 | 92.2 |
| G028806 | 35.7 | 33.6 |
| G028807 | 0.49 | 0.34 |
| G028808 | 0.79 | 0.17 |
| G028809 | 0.88 | 0.47 |
| G028810 | 0.42 | 0.83 |
| G028811 | 0.14 | 0.15 |
| G028812 | 0.38 | 0.17 |
| G028813 | 42.4 | 33.2 |
| G028814 | 34.3 | 35.3 |
| G028815 | 73.7 | 48.4 |
| G028816 | 49.4 | 35.7 |
| G028817 | 0.64 | 0.39 |
| G028818 | 0.46 | 0.32 |
| G028819 | 1.81 | 2.14 |
| G028820 | 2.45 | 3.88 |
| G028821 | 14.9 | 16.5 |
| G028822 | 3.47 | 1.71 |
| G028823 | 0.31 | 0.22 |
| G028824 | 2.77 | 2.47 |
| G028825 | 58.3 | 35.8 |
| G028826 | 92.1 | 57.2 |
| G028827 | 0.28 | 0.37 |
| G028828 | 0.89 | 1.01 |
| G028829 | 15.5 | 13.9 |
| G028830 | 6.77 | 0.15 |
| G028831 | 21.9 | 24.6 |
| G028832 | 34.9 | 34.1 |
| G028833 | 0.76 | 0.48 |
| G028834 | 0.21 | 0.3 |
| G028835 | 0.75 | 0.72 |
| G028836 | 0.5 | 0.49 |
| G028837 | 1.03 | 0.36 |
| G028838 | 0.82 | 0.21 |
| G028839 | 4.75 | 4.34 |
| G028840 | 0.68 | 0.21 |
| G028841 | 1.28 | 0.36 |
| G028842 | 1.31 | 0.19 |
| G028843 | 1.25 | 0.43 |
| G021469 TRAC | 0.42 | 0.63 |
| G021475 TRAC | 0.83 | 0.14 |
| G021481 TRAC | 0.19 | 0.12 |

### Example 8: LNP Dose Response Curves (DRC) for Top HLA-A and HLA-B Nme2 Guides

[1001] A DRC was run for lead HLA-A and HLA-B sgRNAs along with Nme2 BC22 to determine the best guide for knocking out HLA genes. sgRNAs were titrated in 8-point DRC along with fixed concentration of an mRNA encoding UGI (SEQ ID NO: 821) (3490 ng/L) and an mRNA encoding Nme2 BC22n base editor (SEQ ID NO: 822) (1709 ng/L) or an mRNA encoding a Spy-cleavase (SEQ ID NO: 827) (2230 ng/L) in T cells using electroporation. T cells were then analyzed by flow cytometry to determine editing efficiencies. T cells were prepared as described in Example 1.

8.1 mRNA Electroporation

[1002] Solutions containing mRNA encoding BC22n (SEQ ID NO: 822) and UGI (SEQ ID NO: 821) were prepared in P3 buffer. 100 μM HLA-B targeting sgRNAs were removed from their storage plates and denatured for 2 minutes at 95° C. and incubated at room temperature for 5 minutes. Forty-eight hours post activation, T cells were harvested, centrifuged, and resuspended at a concentration of 12.5×10\hat{ }₆ T cells/mL in P3 electroporation buffer (Lonza Catalog #V4SP-3960). Each sgRNA was serially diluted in ratio of 1:2 in P3 electroporation buffer starting from 5 μM in a 96 well PCR plate in duplicate as described in Table 19. Following dilution, 1×10\hat{ }5 T cells, 20 ng/μL of BC22n mRNAs and 20 ng/μL of UGI mRNA were mixed with sgRNA plate to make the final volume of 20 μL of P3 electroporation buffer. The mix was transferred to two 96-well Nucleofector™ plates. Cells were electroporated in duplicate using Lonza shuttle 96w using manufacturer's pulse code. Immediately post electroporation, cells were recovered in 80 μL of TCGM without cytokines at 37° C. for 15 minutes. Electroporated T cells were subsequently cultured in TCGM further supplemented with 2× cytokines (200 U/mL recombinant human interleukin-2 (Peprotech, Cat. 200-02), 5 ng/mL recombinant human interleukin-7 (Peprotech, Cat. 200-07), and 5 ng/mL recombinant human interleukin-15 (Peprotech, Cat. 200-15) per well. The plates were incubated at 37° C. for 10 days. On day 7 post-edit, edited T cells were collected for flow cytometry analysis.

### 8.2 Flow Cytometry

[1003] On day 10, cells were transferred to U bottom plates, spun and resuspended in master mix containing antibodies for PerCP/Cy5.5 CD3 (BioLegend, Cat. 317434), BV421 CD4 (BioLegend, Cat. 317434), BV785 CD8 (BioLegend, Cat. 301046), HLA A2 (BioLegend Inc., Cat. 343306), HLA B7 (Miltenyi Biotec Inc., Cat. 130-120-234) at a 1:200 dilution and Viakrome (Immunotech, Cat. C36628) at 1:100 final concentration in FACs buffer and then incubated at 4° C. for 30 minutes. After the incubation, the cells were washed and resuspended in 100 μL FACs buffer (PBS+2% FBS+2 mM EDTA) and processed by flow cytometry using a Beckman Coulter CytoflexS, and analyzed using the FlowJo software package. Tables 19 and 20 and FIGS. 6 and 7 show the percent editing at each sgRNA dose.

TABLE 19
Dose response curve for the percent of HLA-A2⁻ of CD8⁺ cells with
various doses of sgRNA

| | G028907 | | | G028913 | | | G028840 | | |
|---|---|---|---|---|---|---|---|---|---|
| Guide | Mean | SD | | Mean | SD | | Mean | SD | |
| sgRNA | % CD8⁺ | % CD8⁺ | | % CD8⁺ | % CD8⁺ | | % CD8⁺ | % CD8⁺ | |
| (μg/mL) | Cells | Cells | N | Cells | Cells | N | Cells | Cells | N |
| 5 | 98.65 | 0.07 | 2 | 97.20 | 0.42 | 2 | 98.00 | 0.14 | 2 |
| 2.5 | 98.25 | 0.21 | 2 | 96.15 | 0.07 | 2 | 97.30 | 0.28 | 2 |
| 1.25 | 97.40 | 0.14 | 2 | 93.30 | 0.00 | 2 | 94.35 | 0.92 | 2 |
| 0.625 | 95.70 | 0.42 | 2 | 90.85 | 0.92 | 2 | 90.00 | 0.99 | 2 |
| 0.313 | 92.40 | 0.00 | 2 | 85.55 | 1.77 | 2 | 78.85 | 0.92 | 2 |
| 0.078 | 80.20 | 3.25 | 2 | 68.25 | 3.75 | 2 | 55.95 | 0.35 | 2 |
| 0 | 54.45 | 2.05 | 2 | 42.70 | 1.13 | 2 | 31.45 | 0.64 | 2 |
| EC50 | 0.07038 | | | 0.08998 | | | 0.1289 | | |
| | G028922 | | | G028918 | | | G028865 | | |
| Guide | Mean | SD | | Mean | SD | | Mean | SD | |
| sgRNA | % CD8⁺ | % CD8⁺ | | % CD8⁺ | % CD8⁺ | | % CD8⁺ | % CD8⁺ | |
| (μg/mL) | Cells | Cells | N | Cells | Cells | N | Cells | Cells | N |
| 5 | 98.65 | 0.21 | 2 | 92.15 | 0.07 | 2 | 90.95 | 1.06 | 2 |
| 2.5 | 95.00 | 0.99 | 2 | 89.45 | 1.20 | 2 | 90.20 | 1.27 | 2 |
| 1.25 | 74.90 | 2.12 | 2 | 87.25 | 1.06 | 2 | 87.20 | 0.42 | 2 |
| 0.625 | 54.20 | 0.42 | 2 | 83.40 | 0.71 | 2 | 81.35 | 1.34 | 2 |
| 0.313 | 36.80 | 0.85 | 2 | 72.05 | 0.64 | 2 | 75.45 | 1.06 | 2 |
| 0.078 | 18.60 | 0.42 | 2 | 48.80 | 0.85 | 2 | 55.60 | 2.26 | 2 |
| 0 | 8.73 | 0.02 | 2 | 24.65 | 1.20 | 2 | 34.30 | 1.56 | 2 |
| EC50 | 0.6028 | | | 0.1429 | | | 0.09631 | | |
| | G028832 | | | G028795 | | | G028869 | | |
| Guide | Mean | SD | | Mean | SD | | Mean | SD | |
| sgRNA | % CD8⁺ | % CD8⁺ | | % CD8⁺ | % CD8⁺ | | % CD8⁺ | % CD8⁺ | |
| (μg/mL) | Cells | Cells | N | Cells | Cells | N | Cells | Cells | N |
| 5 | 1.45 | 0.13 | 2 | 5.74 | 0.32 | 2 | 70.55 | 0.49 | 2 |
| 2.5 | 0.71 | 0.03 | 2 | 2.99 | 0.76 | 2 | 61.75 | 0.92 | 2 |
| 1.25 | 0.37 | 0.04 | 2 | 1.65 | 0.10 | 2 | 43.75 | 1.91 | 2 |
| 0.625 | 0.33 | 0.04 | 2 | 0.96 | 0.03 | 2 | 25.45 | 0.92 | 2 |
| 0.313 | 0.49 | 0.15 | 2 | 0.82 | 0.08 | 2 | 14.55 | 0.92 | 2 |
| 0.078 | 0.29 | 0.08 | 2 | 0.39 | 0.01 | 2 | 6.20 | 0.33 | 2 |
| 0 | 0.40 | 0.13 | 2 | 0.35 | 0.10 | 2 | 3.19 | 0.40 | 2 |
| EC50 | 2.654 | | | 15.82 | | | 0.9213 | | |
| | G000529 B2M | | | G018995 Spy Cas | | | G022020 Spy Cas | | |
| Guide | Mean | SD | | Mean | SD | | Mean | SD | |
| sgRNA | % CD8⁺ | % CD8⁺ | | % CD8⁺ | % CD8⁺ | | % CD8⁺ | % CD8⁺ | |
| (μg/mL) | Cells | Cells | N | Cells | Cells | N | Cells | Cells | N |
| 5 | 96.15 | 0.07 | 2 | 98.20 | 0.42 | 2 | 6.11 | 1.70 | 2 |
| 2.5 | 94.85 | 0.49 | 2 | 97.80 | 0.00 | 2 | 6.39 | 3.83 | 2 |
| 1.25 | 93.45 | 1.20 | 2 | 97.60 | 1.13 | 2 | 3.52 | 0.04 | 2 |
| 0.625 | 90.55 | 0.07 | 2 | 96.10 | 0.42 | 2 | 2.04 | 0.66 | 2 |
| 0.313 | 83.50 | 3.39 | 2 | 91.50 | 1.84 | 2 | 1.12 | 0.07 | 2 |
| 0.078 | 57.60 | 4.67 | 2 | 75.10 | 0.00 | 2 | 0.69 | 0.16 | 2 |
| 0 | 25.25 | 1.48 | 2 | 41.20 | 0.85 | 2 | 3.00 | 2.61 | 2 |

| | | | |
|---|---|---|---|
| EC50 | 0.1087 | 0.09102 | 1.286 |

TABLE 20
Dose response curve for the percent of HLA-B7⁻ of CD8+ cells with
various doses of sgRNA

| | G028907 | | | G028913 | | | G028840 | | |
|---|---|---|---|---|---|---|---|---|---|
| Guide | Mean | SD | | Mean | SD | | Mean | SD | |
| sgRNA | % CD8⁺ | % CD8⁺ | | % CD8⁺ | % CD8⁺ | | % CD8⁺ | % CD8⁺ | |
| (μg/mL) | Cells | Cells | N | Cells | Cells | N | Cells | Cells | N |
| 5 | 85.15 | 0.35 | 2 | 16.35 | 0.21 | 2 | 14.20 | 1.84 | 2 |
| 2.5 | 76.45 | 0.49 | 2 | 10.00 | 1.41 | 2 | 7.65 | 0.90 | 2 |
| 1.25 | 59.25 | 0.64 | 2 | 4.87 | 0.23 | 2 | 3.69 | 1.02 | 2 |
| 0.625 | 37.50 | 2.26 | 2 | 2.62 | 0.04 | 2 | 2.11 | 0.56 | 2 |
| 0.313 | 22.65 | 0.92 | 2 | 1.27 | 0.25 | 2 | 1.34 | 0.11 | 2 |
| 0.078 | 12.15 | 1.63 | 2 | 0.79 | 0.12 | 2 | 0.82 | 0.06 | 2 |
| 0 | 5.44 | 0.15 | 2 | 0.43 | 0.08 | 2 | 0.64 | 0.08 | 2 |
| EC50 | 0.8643 | | | 4.531 | | | 24.96 | | |
| | G028922 | | | G028918 | | | G028865 | | |
| Guide | Mean | SD | | Mean | SD | | Mean | SD | |
| sgRNA | % CD8⁺ | % CD8⁺ | | % CD8⁺ | % CD8⁺ | | % CD8⁺ | % CD8⁺ | |
| (μg/mL) | Cells | Cells | N | Cells | Cells | N | Cells | Cells | N |
| 5 | 39.00 | 0.28 | 2 | 0.63 | 0.01 | 2 | 0.52 | 0.06 | 2 |
| 2.5 | 21.65 | 1.20 | 2 | 0.49 | 0.33 | 2 | 0.41 | 0.12 | 2 |
| 1.25 | 9.60 | 0.13 | 2 | 0.47 | 0.03 | 2 | 0.20 | 0.14 | 2 |
| 0.625 | 4.81 | 0.13 | 2 | 0.19 | 0.00 | 2 | 0.20 | 0.01 | 2 |
| 0.313 | 3.08 | 0.62 | 2 | 0.21 | 0.16 | 2 | 0.20 | 0.09 | 2 |
| 0.078 | 1.42 | 0.00 | 2 | 0.31 | 0.23 | 2 | 0.13 | 0.03 | 2 |
| 0 | 1.42 | 1.19 | 2 | 0.21 | 0.13 | 2 | 0.09 | 0.08 | 2 |
| EC50 | 5.494 | | | 1.217 | | | 0.03500 | | |
| | G028832 | | | G028795 | | | G028869 | | |
| Guide | Mean | SD | | Mean | SD | | Mean | SD | |
| sgRNA | % CD8⁺ | % CD8⁺ | | % CD8⁺ | % CD8⁺ | | % CD8⁺ | % CD8⁺ | |
| (μg/mL) | Cells | Cells | N | Cells | Cells | N | Cells | Cells | N |
| 5 | 87.05 | 1.77 | 2 | 91.75 | 1.34 | 2 | 80.80 | 1.70 | 2 |
| 2.5 | 85.20 | 5.09 | 2 | 84.50 | 3.82 | 2 | 66.70 | 2.40 | 2 |
| 1.25 | 82.60 | 1.84 | 2 | 74.40 | 1.27 | 2 | 45.70 | 2.55 | 2 |
| 0.625 | 78.85 | 3.04 | 2 | 49.90 | 0.85 | 2 | 24.75 | 3.32 | 2 |
| 0.313 | 73.50 | 0.42 | 2 | 31.05 | 2.19 | 2 | 15.30 | 0.85 | 2 |
| 0.078 | 55.05 | 2.47 | 2 | 17.60 | 1.56 | 2 | 7.17 | 0.26 | 2 |
| 0 | 34.85 | 1.63 | 2 | 7.86 | 0.65 | 2 | 3.25 | 0.13 | 2 |
| EC50 | 0.1029 | | | 0.5729 | | | 1.205 | | |
| | G000529 B2M | | | G018995 Spy Cas | | | G022020 Spy Cas | | |
| Guide | Mean | SD | | Mean | SD | | Mean | SD | |
| sgRNA | % CD8⁺ | % CD8⁺ | | % CD8⁺ | % CD8⁺ | | % CD8⁺ | % CD8⁺ | |
| (μg/mL) | Cells | Cells | N | Cells | Cells | N | Cells | Cells | N |
| 5 | 96.15 | 0.07 | 2 | 1.74 | 0.25 | 2 | 92.70 | 1.70 | 2 |
| 2.5 | 94.50 | 0.57 | 2 | 1.55 | 0.08 | 2 | 82.25 | 7.71 | 2 |
| 1.25 | 93.20 | 0.99 | 2 | 1.94 | 0.28 | 2 | 67.45 | 7.42 | 2 |
| 0.625 | 89.95 | 0.07 | 2 | 2.06 | 0.73 | 2 | 35.55 | 0.49 | 2 |
| 0.313 | 82.85 | 3.46 | 2 | 1.82 | 0.36 | 2 | 15.90 | 1.41 | 2 |
| 0.078 | 57.15 | 4.45 | 2 | 1.52 | 0.35 | 2 | 6.70 | 0.18 | 2 |
| 0 | 24.80 | 1.41 | 2 | 1.12 | 0.01 | 2 | 4.84 | 1.07 | 2 |

| | | | |
|---|---|---|---|
| EC50 | 0.1091 | 0.1053 | 0.8285 |

### Example 9. HLA-B KO in Induced Pluripotent Stem Cells (iPSC)

[1004] Induced pluripotent stem cells were edited using HLA-B guide G022020 in a single KO experiment. Additionally, iPSCs were edited using HLA-B guide G022020, HLA-A guide 018995, and CIITA guide G013675 (CCCCCGGACGGUUCAAGCAA targeting sequence; SEQ ID NO: 3110) in a triple KO experiment. The results are shown below in Table 21.

TABLE 21
Editing efficiency in iPSC using HLA-B targeting guide RNA

| | |
|---|---|
| ddPCR | Flow Cytometry |

| Efficiency | HLA-B | Efficiency | HLA-B |
|---|---|---|---|
| Single KO | 77% | Single KO | 83% |
| Triple KO | 79% | Triple KO | 71% |

### Example 10: Screening of HLA-B Guides with Nme2 BC22n

[1005] 28 sgRNAs targeting HLA-B were screened at a fixed concentration of 3 μg/mL. Previously tested sgRNA (G028907) targeting HLA-B was used as a control. Guides, mRNA encoding UGI (0.5 μg/mL) (SEQ ID NO: 821), and mRNA encoding Nme2 BC22n (1 μg/mL) (SEQ ID NO: 828) were individually delivered using LNPs in parallel.

10.1 T cell Preparation

[1006] Healthy human donor apheresis was obtained commercially (Hemacare), and cells were washed and resuspended in CliniMACS® PBS/EDTA buffer (Miltenyi Biotec Cat. 130-070-525) and processed in a MultiMACS™ Cell 24 Separator Plus device (Miltenyi Biotec).
[1007] T cells were isolated via positive selection
[1008] using a Straight from Leukopak® CD4/CD8 MicroBead kit,
[1009] human (Miltenyi Biotec Cat. 130-122-352). T cells were aliquoted and cryopreserved for future use in Cryostor® CS10 (StemCell Technologies Cat. 07930). Upon thaw, T cells were plated at a density of 1.0×10⁶ cells/mL in T cell growth media (TCGM) composed of CTS OpTmizer T Cell Expansion SFM and T Cell Expansion Supplement (ThermoFisher, Cat. A1048501) containing 5% human AB serum (GeminiBio, Cat. 100-512), 1× Penicillin-Streptomycin, 1× Glutamax, 10 mM HEPES, 1× cytokines (200 U/mL recombinant human interleukin-2 (Peprotech, Cat. 200-02), 5 ng/mL recombinant human interleukin 7 (Peprotech, Cat. 200-07), and 5 ng/mL recombinant human interleukin 15 (Peprotech, Cat. 200-15)). T cells were rested in the T cell growth media for 24 hours at which time they were activated with TransAct™ (1:100 dilution, Miltenyi Biotec, Cat. 130-111-160). T cells were activated 48 hours prior to LNP treatment.
   10.2 T Cell Editing with HTP LNPs

[1010] T cells were edited at the HLA-B locus with mRNA encoding Nme2 BC22n (SEQ ID NO: 828) and UGI (SEQ ID NO: 821) to assess sgRNA editing efficacy and the corresponding loss of HLA-B7 and HLA-B8 expression.

[1011] Forty-eight hours post activation, T cells were harvested, centrifuged at 500 g for 5 minutes, and resuspended at a concentration of 1×10⁶ T cells/mL in T cell growth media and plated in 96 well plates accordingly. For each well to be treated with LNPs, 0.5×10⁵ T cells were mixed 2:1 ratio with LNP containing 4 μg/mL of Nme2 BC22n mRNA and LNP containing 2 μg/mL of UGI mRNA and 2:1 with LNP containing 12 μg/mL HLA-B sgRNA in a final volume of 100 μL of T cell growth media. The plates were incubated at 37° C. for 10 days. On day 10 post-thaw, T cells were collected for flow cytometry analysis.

### 10.3 Flow Cytometry

[1012] T cells were phenotyped by flow cytometry to determine HLA-B7 and HLA-B8 protein expression. Briefly, T cells were incubated for 30 minutes at 4° C. with a mixture of antibodies against CD3 (BioLegend, Cat. No. 317334), CD4 (BioLegend, Cat. No. 300536), CD8 (BioLegend, Cat. No. 344740), Viakrome (Immunotech, Cat. No. C36628), HLA-B7 (Miltenyi Biotec, Cat. No. 130-120-234), HLA-B8 (Miltenyi Biotec, Cat. No. 130-118-366), HLA-A2 (eBioscience, Cat. No. 17-9876-42), HLA-A3 (eBioscience, Cat. No. 12-5754-42). HLA-E (BioLegend, Cat. No. 342612), and HLA-C (BD Pharmingen Cat. No. 566372), diluted at 1:100 in cell staining buffer. Cells were subsequently washed and resuspended in 100 μL of cell staining buffer. Cells were then processed on a Cytoflex flow cytometer (Beckman Coulter) and analyzed using the FlowJo software package. T cells were gated based on size, shape, viability, CD8, CD3, HLA-E retention, HLA-C retention, and HLA-B7 and HLA-B8 expression. Table 22 and FIG. 8A show the mean percentage of cells negative for HLA-B7 following editing at the HLA-B locus. Table 23 and FIG. 8B show the mean percentage of cells negative for HLA-B8 following editing at the HLA-B locus.

TABLE 22
Mean % HLA-B7⁻ T cells following editing at the HLA-B locus

| | % HLA-B7 −ve | | |
|---|---|---|---|
| Guide ID | Mean | SD | N |
| G032787 | 27.46 | 0.226274 | 2 |
| G032788 | 49.24 | 4.723473 | 2 |
| G032789 | 14.4 | 3.323402 | 2 |
| G032790 | 2.48 | 0.650538 | 2 |
| G032791 | 0.035 | 0.007071 | 2 |
| G032792 | 76.87 | 5.996266 | 2 |
| G032793 | 74.19 | 7.113494 | 2 |
| G032794 | 88.33 | 3.422397 | 2 |
| G032795 | 93.61 | 1.668772 | 2 |
| G032796 | 2.365 | 0.869741 | 2 |
| G028919 | 0.165 | 0.176777 | 2 |
| G032797 | 0.125 | 0.021213 | 2 |
| G032798 | 81.355 | 0.304056 | 2 |
| G032799 | 4.075 | 0.374767 | 2 |
| G032800 | 28.985 | 0.049497 | 2 |
| G032801 | 16.63 | 0.296985 | 2 |
| G032802 | 20.805 | 1.152584 | 2 |
| G032803 | 1.035 | 0.049497 | 2 |
| G032804 | 4.1 | 0.19799 | 2 |
| G032805 | 9.765 | 0.304056 | 2 |
| G032806 | 85.975 | 0.374767 | 2 |
| G032807 | 38.13 | 0.042426 | 2 |
| G032808 | 8.245 | 0.657609 | 2 |
| G032809 | 34.675 | 2.750645 | 2 |
| G032810 | 2.105 | 0.162635 | 2 |
| G032811 | 47.61 | 0.268701 | 2 |
| G032812 | 2.72 | 0.113137 | 2 |
| G032813 | 3.965 | 0.120208 | 2 |

TABLE 23
Mean % HLA-B8⁻ T cells following editing at the HLA-B locus

| | % HLA-B8 −ve | | |
|---|---|---|---|
| Guide ID | Mean | SD | N |
| G032787 | 4.215 | 0.799031 | 2 |
| G032788 | 56.06 | 2.91328 | 2 |
| G032789 | 31.46 | 3.563818 | 2 |
| G032790 | 21.9 | 3.436539 | 2 |
| G032791 | 0.7 | 0.056569 | 2 |
| G032792 | 94.43 | 1.810193 | 2 |
| G032793 | 92.05 | 3.719382 | 2 |
| G032794 | 97.135 | 1.265721 | 2 |
| G032795 | 98.2 | 1.117229 | 2 |
| G032796 | 18.15 | 2.672864 | 2 |
| G028919 | 1.64 | 0.141421 | 2 |
| G032797 | 0.28 | 0.014142 | 2 |
| G032798 | 88.635 | 0.431335 | 2 |
| G032799 | 25.84 | 0.650538 | 2 |
| G032800 | 51.57 | 0.070711 | 2 |
| G032801 | 38.985 | 1.491995 | 2 |
| G032802 | 44.305 | 0.544472 | 2 |
| G032803 | 9.38 | 0.353553 | 2 |
| G032804 | 19.48 | 0.551543 | 2 |
| G032805 | 41.23 | 0.296985 | 2 |
| G032806 | 91.28 | 0.46669 | 2 |
| G032807 | 69.295 | 0.021213 | 2 |
| G032808 | 37.38 | 0.876812 | 2 |
| G032809 | 67.05 | 1.484924 | 2 |
| G032810 | 46.075 | 0.275772 | 2 |
| G032811 | 1.9 | 0.084853 | 2 |
| G032812 | 16.26 | 0.509117 | 2 |
| G032813 | 22.035 | 0.049497 | 2 |

### Example 11: NK Cell Functional Killing Assays

[1013] T cells edited in various combinations to disrupt CIITA, HLA-A, HLA-B, or B2M were tested for their ability to resist natural killer (NK) cell mediated killing.

### 11.1. Engineering T Cells and Purification

[1014] Upon thaw, Pan CD3+ T cells (StemCell, HLA-A*02:01:01; B*08:01:01; C*07:01:01) were plated at a density of 0.5×10⁶ cells/mL in T cell TCAM media composed of CTS OpTmizer T Cell Expansion SFM (Gibco, Cat. A3705001) containing 2.5% (v/v) of Human AB Serum, 1% (v/v) Glutamax (Gibco, Cat. 35050-061) and 1% (v/v) 1M HEPES buffer (Gibco, Cat. 15630080), 1% of Penicillin-Streptomycin, and supplemented with 100 U/mL of recombinant human interleukin-2 (Peprotech, Cat. 200-02), 5 ng/mL of human interleukin-7 (Peprotech, Cat. 200-07) and 5 ng/mL of human interleukin-15 (Peprotech, Cat. 200-15).

[1015] On Day 1 (one day post-thaw), T cells were activated with TransAct™ (1:100 dilution, Miltenyi Biotec). As described in Table 24, T cells were edited to disrupt the HLA-A, HLA-B, or B2M gene. LNP compositions containing Spy Cas9 mRNA and one sgRNA G000529 targeting B2M, sgRNA G018995 targeting HLA-A, or sgRNAs G027488, G027490, G027994, G028001, and G028002 targeting HLA-B were formulated as described in Example 1. LNP compositions were incubated in TCAM with cytokines as described above supplemented with 5 μg/ml recombinant human ApoE3 (Peprotech, Cat. 350-02) for 15 minutes at 37° C. An equal volume of LNP mix was added to one million activated T cells to yield a final concentration of 2.5 μg total LNP/mL for the B2M LNP; 1.25 μg total LNP/mL for the HLA-B LNPs, and 0.625 μg total LNP/mL for the HLA-A LNP.

TABLE 24
Order of sequential editing and viral transduction

| Condition | Day 1 | Day 2 |
|---|---|---|
| Unedited | | |
| B2M KO | B2M LNP | |
| HLA-A KO | HLA-A LNP | |
| HLA-B KO | HLA-B LNP | |
| (G027488) | | |
| HLA-B KO | HLA-B LNP | |
| (G027490) | | |
| HLA-B KO | HLA-B LNP | |
| (G027994) | | |
| HLA-B KO | HLA-B LNP | |
| (G028001) | | |
| HLA-B KO | HLA-B LNP | |
| (G028002) | | |
| HLA-A + HLA-B | HLA-A LNP | HLA-B LNP |
| KO (G027488) | | |
| HLA-A + HLA-B | HLA-A LNP | HLA-B LNP |
| KO (G027490) | | |
| HLA-A + HLA-B | HLA-A LNP | HLA-B LNP |
| KO (G027994) | | |
| HLA-A + HLA-B | HLA-A LNP | HLA-B LNP |
| KO (G028001) | | |
| HLA-A + HLA-B | HLA-A LNP | HLA-B LNP |
| KO (G028002) | | |

[1016] One day post activation (i.e., Day 2), additional T cells were edited with LNP compositions to disrupt the HLA-B gene (refer to Table 24, Day 2 column). This was performed for HLA-B editing using LNP compositions containing Spy Cas9 mRNA and sgRNAs G027488, G027490, G027994, G028001 and G028002 targeting HLA-B. LNP compositions were incubated in TCAM with cytokines as described above supplemented with 25 μg/ml recombinant human ApoE3 (Peprotech, Cat. 350-02) for 15 minutes at 37° C. A volume equal to 1/10^{th} the volume of the cells was added to each well containing approximately 1 million cells to yield a final concentration of 1.25 μg total LNP/mL for each of the HLA-B LNPs.

[1017] Two days post activation (i.e, Day 3), all cells were transferred to GREX plate (Wilson Wolf, Cat. 80240M) for expansion with TCEM media composed of CTS OpTmizer T Cell Expansion SFM (Gibco, Cat. A3705001) containing 5% (v/v) of CTS™ Immune Cell SR (Gibco, Cat. A2596101), 1% (v/v) Glutamax (Gibco, Cat. 35050-061) and 1% (v/v) 1M HEPES buffer (Gibco, Cat. 15630080), 1% of Penicillin-Streptomycin, and supplemented with 100 U/mL of recombinant human interleukin-2 (Peprotech, Cat. 200-02), 5 ng/mL of human interleukin-7 (Peprotech, Cat. 200-07) and 5 ng/mL of human interleukin-15 (Peprotech, Cat. 200-15). Half of the media from the GREX wells was replaced with fresh TCEM supplemented with cytokines on Days 5, 7 and 9.

[1018] Five days post activation (i.e., Day 6) cells were stained by flow cytometry antibodies to determine HLA-A2 expression (HLA-A+), HLA-B8 expression (HLA-B8+), and HLA-Class-I expression (MHC I+) following knockout of B2M. T cells were incubated with an antibody cocktail targeting the following molecules: HLA-A2 (Biolegend, Cat. 343326), HLA-B8 (Miltenyi Biotec, Cat. 130-118-366), and B2M (Biolegend, Cat. 316304). Cells were subsequently washed, and analyzed on a Cytoflex LX instrument (Beckman Coulter) using the FlowJo software package.

### 11.2 Flow Cytometry

[1019] NK cell mediated cytotoxicity towards engineered T cells was assayed. T cells were co-cultured with the HLA-B/C matched CTV labelled NK cells at effector to target ratios (E:T) of 8:1, 4:1, 2:1, 1:1, 0.5:1, 0.25:1, and 0.125:1 for 21 hours. The cells were stained with 7AAD (BD Pharmingen, Cat. 559925), processed on a Cytoflex flow cytometer (Beckman Coulter) and analyzed using the FlowJo software package. T cells were gated based on CTV negativity, size, and shape and viability. Table 25 and FIG. 9 show the mean percentage of T cell lysis following NK cell challenge.

TABLE 25
Percentage T cell lysis following NK cell challenge to engineered T cells

| | | | | | HLA-A KO | | HLA-B KO | | |
|---|---|---|---|---|---|---|---|---|---|
| | WT | | B2M KO | | G018995 | | G027994 | | |
| NK:T | Mean | SD | Mean | SD | Mean | SD | Mean | SD | n |
| 8 | 12.45 | 1.272792 | 83.78 | 0.19799 | 10 | 0.565685 | 29.4 | 0.424264 | 2 |
| 4 | 8.95 | 0.141421 | 83.29 | 0.226274 | 13.1 | 4.525483 | 24.85 | 0.353553 | 2 |
| 2 | 7.65 | 0.282843 | 82.34 | 2.545584 | 10.7 | 1.131371 | 21.65 | 1.06066 | 2 |
| 1 | 5.85 | 0.707107 | 78.07 | 2.291026 | 8.8 | 2.687006 | 19.45 | 0.494975 | 2 |
| 0.5 | 3.3 | 0.919239 | 48.6 | 3.606245 | 7.45 | 1.909188 | 14.5 | 1.131371 | 2 |
| 0.25 | 2.25 | 0.282843 | 23.95 | 7.919596 | 7.25 | 0.919239 | 8.4 | 0.848528 | 2 |
| 0.125 | 0.8 | 0.212132 | 16.05 | 11.45513 | 1.25 | 0.212132 | 5.05 | 0.919239 | 2 |
| (Basal) | 0 | 0.070711 | −5.225 | 7.389266 | 0 | 1.697056 | 0 | 0 | 2 |
| 0 | | | | | | | | | |

| | HLA-B KO | | HLA-A+ B KO | | HLA-A+ B KO | | |
|---|---|---|---|---|---|---|---|
| | G028001 | | G027994 | | G028001 | | |
| NK:T | Mean | SD | Mean | SD | Mean | SD | n |
| 8 | 44.25 | 1.979899 | 51.75 | 2.12132 | 61.6 | 0.070711 | 2 |
| 4 | 29.3 | 0.212132 | 46.85 | 2.545584 | 49.25 | 2.545584 | 2 |
| 2 | 19.7 | 1.484924 | 30.35 | 1.131371 | 34.85 | 3.676955 | 2 |
| 1 | 13.25 | 1.414214 | 23.85 | 1.555635 | 20.75 | 4.949747 | 2 |
| 0.5 | 8.9 | 1.626346 | 17.4 | 0.919239 | 15.5 | 7.2832 | 2 |
| 0.25 | 2 | 0.070711 | 14.65 | 6.788225 | 0.45 | 0.707107 | 2 |
| 0.125 | 4.35 | 5.23259 | 4.9 | 1.626346 | 9.1 | 14.21285 | 2 |
| (Basal) | 0 | 2.474874 | 0 | 0.353553 | 0 | 8.980256 | 2 |
| 0 | | | | | | | |

### Example 12: LNP Dose Response Curves (DRC) for Select HLA-B Nme2 BC22n Guides

[1020] A DRC was run for select HLA-B sgRNAs along with Nme2 BC22 to determine suitable guides for knocking out the HLA-B gene. sgRNAs were titrated in 8-point DRC along with fixed concentration of an mRNA encoding UGI (SEQ ID NO: 824) (3490 ng/μL) and an mRNA encoding Nme2 BC22n base editor (SEQ ID NO: 828) (1709 ng/μL) in T cells using LNPs. T cells were then analysed by flow cytometry to determine editing efficiencies. T cells were prepared as described in Example 1.

12.1 T Cell Editing with HPLC-Purified Guide LNPs

[1021] T cells were edited at the HLA-B locus with mRNA encoding Nme2 BC22n (SEQ ID NO: 828) and UGI (SEQ ID NO: 824) to assess sgRNA editing efficacy and the corresponding loss of HLA-B7 and HLA-B8 expression.

[1022] Forty-eight hours post activation, T cells were adjusted to a concentration of 1×10⁶ T cells/mL in T cell growth media and plated in 96 well plates accordingly. For each well to be treated with LNPs, 0.5×10⁵ T cells were mixed 2:1 ratio with LNP containing 10 μg/mL of Nme2 BC22n mRNA and HLA-B sgRNA; and LNP containing 0.4 μg/mL of UGI mRNA in a final volume of 100 μL of T cell growth media. The plates were incubated at 37° C. for 10 days with every other day media refreshing. On day 10 post-thaw, T cells were collected for flow cytometry analysis.

### 12.2 Flow Cytometry

[1023] On day 10, cells were transferred to U bottom plates, spun and resuspended in master mix containing antibodies for PerCP/Cy5.5 CD3 (BioLegend, Cat. 317336), BV605 CD4 (BioLegend, Cat. 300536), BV785 CD8 (BioLegend, Cat. 344740), BV510 HLA A2 (BioLegend Inc., Cat. 343320), APC HLA A3 (eBioscience, Cat. 12-5754-42), FITC HLA B7 (Miltenyi Biotec Inc., Cat. 130-120-234), FITC HLA B8 (Miltenyi Biotec Inc., Cat. 130-118-366), and BV421 HLA-E (Biolegend, Cat. 342612), PE HLA-C (BD Pharmigen, Cat. 566372) and Viakrome (Immunotech, Cat. C36628) at 1:100 final concentration in FACs buffer and then incubated at 4° C. for 30 minutes. After the incubation, the cells were washed and resuspended in 100 μL FACs buffer (PBS+2% FBS+2 mM EDTA) and processed by flow cytometry using a Beckman Coulter CytoflexS, and analyzed using the FlowJo software package. Tables 26A and 26B and FIGS. 10A and 10C show the percent editing at each sgRNA dose in an HLA-B7 homozygous or heterozygous donor. Tables 27A and 27B and FIGS. 10B and 10D show the percent editing at each sgRNA dose in an HLA-B8 homozygous or heterozygous donor.

TABLE 26A
Dose response curve for the percent of HLA-B7⁻ and CD8⁺ cells
in an HLA-B7 homozygous donor

| | G034206 | | | G034207 | | | G034208 | | |
|---|---|---|---|---|---|---|---|---|---|
| Guide | Mean | SD | | Mean | SD | | Mean | SD | |
| sgRNA | % CD8⁺ | % CD8⁺ | | % CD8⁺ | % CD8⁺ | | % CD8⁺ | % CD8⁺ | |
| (μg/mL) | Cells | Cells | N | Cells | Cells | N | Cells | Cells | N |
| 5.83 | 89.65 | 0.13 | 2 | 85.47 | 1.44 | 2 | 96.39 | 0.17 | 2 |
| 1.46 | 84.24 | 1.87 | 2 | 82.77 | 0.01 | 2 | 95.17 | 0.13 | 2 |
| 0.36 | 45.40 | 2.73 | 2 | 43.17 | 0.74 | 2 | 63.27 | 2.40 | 2 |
| 0.09 | 1.83 | 0.42 | 2 | 2.40 | 0.08 | 2 | 2.95 | 0.49 | 2 |
| 0.02 | 0.43 | 0.10 | 2 | 0.46 | 0.06 | 2 | 0.53 | 0.19 | 2 |
| 0.005 | 0.52 | 0.18 | 2 | 0.52 | 0.32 | 2 | 0.50 | 0.43 | 2 |
| 0.001 | 0.48 | 0.15 | 2 | 0.39 | 0.11 | 2 | 0.37 | 0.23 | 2 |
| 0 | 0.43 | 0.02 | 2 | 0.30 | 0.06 | 2 | 0.49 | 0.23 | 2 |
| | G034209 | | | G034210 | | | G034211 | | |
| Guide | Mean | SD | | Mean | SD | | Mean | SD | |
| sgRNA | % CD8⁺ | % CD8⁺ | | % CD8⁺ | % CD8⁺ | | % CD8⁺ | % CD8⁺ | |
| (μg/mL) | Cells | Cells | N | Cells | Cells | N | Cells | Cells | N |
| 5.83 | 97.30 | 0.42 | 2 | 78.29 | 1.00 | 2 | 86.19 | 2.25 | 2 |
| 1.46 | 97.60 | 0.01 | 2 | 69.27 | 0.65 | 2 | 86.42 | 1.47 | 2 |
| 0.36 | 79.96 | 0.37 | 2 | 22.22 | 3.06 | 2 | 77.08 | 1.28 | 2 |
| 0.09 | 6.58 | 0.50 | 2 | 1.10 | 0.13 | 2 | 17.57 | 2.56 | 2 |
| 0.02 | 0.68 | 0.08 | 2 | 0.92 | 0.13 | 2 | 1.21 | 0.06 | 2 |
| 0.005 | 0.64 | 0.01 | 2 | 0.70 | 0.06 | 2 | 0.63 | 0.29 | 2 |
| 0.001 | 0.29 | 0.02 | 2 | 0.31 | 0.20 | 2 | 0.24 | 0.15 | 2 |
| 0 | 0.46 | 0.06 | 2 | 0.45 | 0.18 | 2 | 0.70 | 0.04 | 2 |

TABLE 26B
Dose response curve for the percent of HLA-B7⁻ and CD8⁺ cells
in an HLA-B7 heterozygous donor

| | G034206 | | | G034207 | | | G034208 | | |
|---|---|---|---|---|---|---|---|---|---|
| Guide | Mean | SD | | Mean | SD | | Mean | SD | |
| sgRNA | % CD8⁺ | % CD8⁺ | | % CD8⁺ | % CD8⁺ | | % CD8⁺ | % CD8⁺ | |
| (μg/mL) | Cells | Cells | N | Cells | Cells | N | Cells | Cells | N |
| 5.83 | 96.82 | 0.08 | 2 | 95.45 | 0.01 | 2 | 99.55 | 0.07 | 2 |
| 1.46 | 92.36 | 1.27 | 2 | 92.25 | 0.88 | 2 | 98.53 | 0.32 | 2 |
| 0.36 | 41.46 | 0.18 | 2 | 51.70 | 1.21 | 2 | 62.67 | 4.94 | 2 |
| 0.09 | 2.02 | 0.45 | 2 | 2.06 | 0.37 | 2 | 4.28 | 0.81 | 2 |
| 0.02 | 0.20 | 0.06 | 2 | 0.15 | 0.02 | 2 | 0.35 | 0.04 | 2 |
| 0.005 | 0.13 | 0.08 | 2 | 0.11 | 0.01 | 2 | 0.14 | 0.02 | 2 |
| 0.001 | 0.18 | 0.01 | 2 | 0.18 | 0.03 | 2 | 0.15 | 0.08 | 2 |
| 0 | 0.11 | 0.01 | 2 | 0.21 | 0.08 | 2 | 0.17 | 0.01 | 2 |
| | G034209 | | | G034210 | | | G034211 | | |
| Guide | Mean | SD | | Mean | SD | | Mean | SD | |
| sgRNA | % CD8⁺ | % CD8⁺ | | % CD8⁺ | % CD8⁺ | | % CD8⁺ | % CD8⁺ | |
| (μg/mL) | Cells | Cells | N | Cells | Cells | N | Cells | Cells | N |
| 5.83 | 99.84 | 0.01 | 2 | 94.04 | 0.43 | 2 | 93.08 | 0.25 | 2 |
| 1.46 | 99.52 | 0.04 | 2 | 83.31 | 0.78 | 2 | 91.28 | 0.13 | 2 |
| 0.36 | 78.88 | 3.32 | 2 | 24.51 | 0.30 | 2 | 83.39 | 1.46 | 2 |
| 0.09 | 7.19 | 1.50 | 2 | 1.46 | 0.05 | 2 | 18.89 | 1.68 | 2 |
| 0.02 | 0.28 | 0.11 | 2 | 0.30 | 0.14 | 2 | 1.32 | 0.86 | 2 |
| 0.005 | 0.23 | 0.03 | 2 | 0.27 | 0.01 | 2 | 0.21 | 0.00 | 2 |
| 0.001 | 0.14 | 0.07 | 2 | 0.24 | 0.02 | 2 | 0.18 | 0.01 | 2 |
| 0 | 0.17 | 0.05 | 2 | 0.22 | 0.06 | 2 | 0.18 | 0.06 | 2 |

TABLE 27A
Dose response curve for the percent of HLA-B8⁻ and CD8⁺ cells
in an HLA-B8 homozygous donor

| | G034206 | | | G034207 | | | G034208 | | |
|---|---|---|---|---|---|---|---|---|---|
| Guide | Mean | SD | | Mean | SD | | Mean | SD | |
| sgRNA | % CD8⁺ | % CD8⁺ | | % CD8⁺ | % CD8⁺ | | % CD8⁺ | % CD8⁺ | |
| (μg/mL) | Cells | Cells | N | Cells | Cells | N | Cells | Cells | N |
| 5.83 | 84.88 | 1.32 | 2 | 80.95 | 0.42 | 2 | 92.87 | 0.18 | 2 |
| 1.46 | 71.55 | 2.94 | 2 | 67.64 | 1.03 | 2 | 83.77 | 1.66 | 2 |
| 0.36 | 29.04 | 3.68 | 2 | 22.14 | 2.69 | 2 | 31.88 | 0.41 | 2 |
| 0.09 | 0.29 | 0.10 | 2 | 0.21 | 0.06 | 2 | 0.40 | 0.04 | 2 |
| 0.02 | 0.01 | 0.00 | 2 | 0.01 | 0.01 | 2 | 0.00 | 0.00 | 2 |
| 0.005 | 0.01 | 0.01 | 2 | 0.02 | 0.03 | 2 | 0.02 | 0.02 | 2 |
| 0.001 | 0.01 | 0.01 | 2 | 0.00 | 0.00 | 2 | 0.00 | 0.00 | 2 |
| 0 | 0.01 | 0.00 | 2 | 0.00 | 0.00 | 2 | 0.05 | 0.01 | 2 |
| | G034209 | | | G034210 | | | G034211 | | |
| Guide | Mean | SD | | Mean | SD | | Mean | SD | |
| sgRNA | % CD8⁺ | % CD8⁺ | | % CD8⁺ | % CD8⁺ | | % CD8⁺ | % CD8⁺ | |
| (μg/mL) | Cells | Cells | N | Cells | Cells | N | Cells | Cells | N |
| 5.83 | 96.75 | 0.34 | 2 | 57.29 | 4.96 | 2 | 82.85 | 0.35 | 2 |
| 1.46 | 93.01 | 0.52 | 2 | 38.65 | 0.18 | 2 | 79.35 | 0.54 | 2 |
| 0.36 | 53.42 | 3.96 | 2 | 5.28 | 0.22 | 2 | 64.19 | 0.30 | 2 |
| 0.09 | 1.17 | 0.16 | 2 | 0.04 | 0.01 | 2 | 6.25 | 0.87 | 2 |
| 0.02 | 0.03 | 0.01 | 2 | 0.02 | 0.01 | 2 | 0.09 | 0.07 | 2 |
| 0.005 | 0.01 | 0.01 | 2 | 0.02 | 0.03 | 2 | 0.02 | 0.01 | 2 |
| 0.001 | 0.00 | 0.00 | 2 | 0.01 | 0.00 | 2 | 0.02 | 0.01 | 2 |
| 0 | 0.00 | 0.00 | 2 | 0.00 | 0.00 | 2 | 0.01 | 0.01 | 2 |

TABLE 27B
Dose response curve for the percent of HLA-B8⁻ and CD8⁺ cells
in an HLA-B8 heterozygous donor

| | G034206 | | | G034207 | | | G034208 | | |
|---|---|---|---|---|---|---|---|---|---|
| Guide | Mean | SD | | Mean | SD | | Mean | SD | |
| sgRNA | % CD8⁺ | % CD8⁺ | | % CD8⁺ | % CD8⁺ | | % CD8⁺ | % CD8⁺ | |
| (μg/mL) | Cells | Cells | N | Cells | Cells | N | Cells | Cells | N |
| 5.83 | 97.98 | 0.23 | 2 | 96.75 | 0.55 | 2 | 99.44 | 0.18 | 2 |
| 1.46 | 94.16 | 0.66 | 2 | 92.78 | 0.26 | 2 | 98.16 | 0.11 | 2 |
| 0.36 | 49.19 | 1.39 | 2 | 52.56 | 0.23 | 2 | 64.63 | 0.85 | 2 |
| 0.09 | 3.25 | 0.48 | 2 | 1.89 | 0.11 | 2 | 5.70 | 0.64 | 2 |
| 0.02 | 0.19 | 0.04 | 2 | 0.02 | 0.00 | 2 | 0.24 | 0.14 | 2 |
| 0.005 | 0.11 | 0.06 | 2 | 0.04 | 0.01 | 2 | 0.07 | 0.07 | 2 |
| 0.001 | 0.07 | 0.04 | 2 | 0.10 | 0.02 | 2 | 0.12 | 0.00 | 2 |
| 0 | 0.14 | 0.01 | 2 | 0.17 | 0.11 | 2 | 0.16 | 0.05 | 2 |
| | G034209 | | | G034210 | | | G034211 | | |
| Guide | Mean | SD | | Mean | SD | | Mean | SD | |
| sgRNA | % CD8⁺ | % CD8⁺ | | % CD8⁺ | % CD8⁺ | | % CD8⁺ | % CD8⁺ | |
| (μg/mL) | Cells | Cells | N | Cells | Cells | N | Cells | Cells | N |
| 5.83 | 99.66 | 0.11 | 2 | 88.96 | 0.16 | 2 | 92.88 | 0.25 | 2 |
| 1.46 | 99.31 | 0.04 | 2 | 72.50 | 0.57 | 2 | 91.49 | 0.72 | 2 |
| 0.36 | 80.98 | 0.74 | 2 | 19.39 | 1.07 | 2 | 82.62 | 0.29 | 2 |
| 0.09 | 10.34 | 0.35 | 2 | 1.59 | 0.06 | 2 | 24.49 | 0.51 | 2 |
| 0.02 | 0.79 | 0.52 | 2 | 0.14 | 0.03 | 2 | 0.74 | 0.07 | 2 |
| 0.005 | 0.13 | 0.13 | 2 | 0.14 | 0.01 | 2 | 0.13 | 0.05 | 2 |
| 0.001 | 0.11 | 0.06 | 2 | 0.11 | 0.03 | 2 | 0.10 | 0.06 | 2 |
| 0 | 0.14 | 0.01 | 2 | 0.17 | 0.11 | 2 | 0.16 | 0.05 | 2 |

### Example 13: Off-Target Analysis of HLA-B Human Guides

[1024] Screening for potential off-target genomic sites cleaved by Cas9 targeting HLA-B was performed. (See, e.g., Cameron et al., Nature Methods. 6, 600-606; 2017). In this experiment, 6 sgRNA targeting human HLA-B and three control guides targeting VEGFA with known off-target profiles were screened using purified genomic DNA from lymphoblast cell line NA24385 (Coriell Institute). The number of potential off-target sites were detected using a sgRNA as shown in Table 28 at a concentration of 192 nM sgRNA and 64 nM RNP in the biochemical assay. The assay identified potential off-target sites for the sgRNAs tested.

TABLE 28
Off-Target Analysis

| | | | Off- |
|---|---|---|---|
| | | | Target |
| gRNA | | Guide Sequence | Site |
| ID | Target | (SEQ ID NO:) | Count |
| G034206 | HLA-B | CAAACUCAGGACACUGAGCUUGUG | 1 |
| | | (SEQ ID NO: 163) | |
| G034207 | HLA-B | UCAGGACACUGAGCUUGUGGAGAC | 1 |
| | | (SEQ ID NO: 164) | |
| G034208 | HLA-B | UCUGGGAAAGGAGGGGAAGAUGAG | 1 |
| | | (SEQ ID NO: 165) | |
| G034209 | HLA-B | CUCUGGGAAAGGAGGGGAAGAUGA | 1 |
| | | (SEQ ID NO: 166) | |
| G034210 | HLA-B | CUGGAGGGUGUGAGACCCUGGCCC | 3 |
| | | (SEQ ID NO: 169) | |
| G034211 | HLA-B | UCCCAGAGCCGUCUUCCCAGUCCA | 2 |
| | | (SEQ ID NO: 177) | |
| G021557 | VEGFA | GCAUGGGCAGGGGCUGGGGUGCAC | 2 |
| | | (SEQ ID NO: 610) | |
| G021558 | VEGFA | GAAUGGCAGGCGGAGGUUGUACUG | 1 |
| | | (SEQ ID NO: 611) | |
| G021567 | VEGFA | GUGAGCAGGCACCUGUGCCAACAU | 1 |
| | | (SEQ ID NO: 612) | |

[1025] In known off-target detection assays such as the biochemical method used above, a large number of potential off-target sites are typically recovered, by design, so as to “cast a wide net” for potential sites that can be validated in other contexts, e.g., in a primary cell of interest. For example, the biochemical method typically overrepresents the number of potential off-target sites as the assay utilizes purified high molecular weight genomic DNA free of the cell environment and is dependent on the dose of Cas9 RNP used. Accordingly, potential off-target sites identified by these methods may be validated using targeted sequencing of the identified potential off-target sites.

### Example 14: In Vivo NK Cell Killing of Engineered T Cells in a Mouse Model

[1026] Female NOG-hIL-15 mice were engrafted with 1.5×10⁶ primary NK cells. Engineered T cells containing luciferase and edited according to Table 29 (various combinations of B2M/HLA-A/HLA-B/TRAC/CIITA KO) were injected 4 weeks later in order to assess protection of the engineered T cells from NK cell killing. 14.1. Preparation of T cells containing luciferase +/−B2M/HLA-A/HLA-B/TRAC/CIITA KO and HD1 TCR

[1027] On day 0, upon thaw, Pan CD3+ T cells (StemCell, HLA-A*02:01:01 A*11:01:01; B*08:01:01; C*07:01:01) were plated at a density of 1-1.5×10⁶ cells/mL in T cell TCAM media composed of CTS OpTmizer T Cell Expansion SFM (Gibco, Cat. A3705001) containing 2.5% (v/v) of Human AB Serum, 1% (v/v) Glutamax (Gibco, Cat. 35050-061) and 1% (v/v) 10 1M HEPES buffer (Gibco, Cat. 15630080), 1% of Penicillin-Streptomycin, and supplemented with 200 U/mL of recombinant human interleukin-2 (Peprotech, Cat. 200-02), 5 ng/mL of human interleukin-7 (Peprotech, Cat. 200-07) and 5 ng/mL of human interleukin-15 (Peprotech, Cat. 200-15).

[1028] On day 1, T cells were activated with TransAct™ (1:100 dilution, Miltenyi Biotec).

[1029] On day 2, cells were transduced with a Lentivirus—LV-SFFV-Luc2-P2A-EmGFP to express GFP/Firefly luciferase (Imanis, Cat. LV050L) at a MOI of 0.5. This was performed by centrifuging the T cells at 500×g for 5 minutes, resuspending them at 2E6 cells/mL and transferring them to sterile 1.5 mL Eppendorf tubes such that each tube received 1E6 cells in 0.5 mL. 100 μL of LV-SFFV-Luc2-P2A-EmGFP (Imanis, Cat. LV050L) was added to each tube and the transduction was performed by centrifuging the tubes at 1000×g for 60 minutes at 37° C. Post centrifugation, cells were combined and transferred back to a cell culture flask and rested overnight in a 37° C. incubator.

[1030] On day 3, as described in Table 29, T cells were edited with LNPs to disrupt the HLA-A or CIITA genes. Briefly, LNPs for each of BC22 mRNA, UGI mRNA and sgRNA G028918 targeting HLA-A or sgRNA G026584 targeting CIITA were formulated as described in Example 1. LNP compositions were incubated in TCAM with cytokines as described above supplemented with 20 μg/mL recombinant human ApoE3 (Peprotech, Cat. 350-02). An equal volume of LNP mix was added to one million activated T cells to yield a final concentration of 0.266 μg total LNP/mL for the HLA-A LNP and 0.34 μg total LNP/mL for the CIITA LNP.

TABLE 29
Order of sequential editing and viral transduction

| Condition | Day 3 | Day 4 | Day 8 |
|---|---|---|---|
| Unedited | | | |
| B2M + CIITA KO | CIITA LNP | B2M LNP | TRAC LNP |
| HLA-A + CIITA | HLA-A LNP, | | TRAC LNP |
| | CIITA LNP | | |
| HLA-B + CIITA | CIITA LNP | HLA-B LNP | TRAC LNP |
| HLA-A + HLA- | HLA-A LNP, | | TRAC LNP |
| B + CIITA | CIITA LNP | | |

[1031] On day 4, the T cells from each group were counted, re-plated at 2×10⁶ cells/mL and edited with LNP compositions to disrupt the HLA-B or B2M genes (where noted in Table 29, Day 4 column). This was performed with LNPs co-formulated with either Nme2 BC22n mRNA and sgRNA G032795 targeting the HLA-B gene or Spy Cas9 mRNA and sgRNA G000529 targeting the B2M gene. LNP compositions were incubated in TCAM with cytokines as described above supplemented with 5 μg/mL recombinant human ApoE3 (Peprotech, Cat. 350-02). A volume equal to the volume of the cells was added to each well containing ˜2 million cells to yield a final concentration of 1.25 μg total LNP/mL for the HLA-B LNP and 2.5 μg total LNP/mL for the B2M LNP.

[1032] On day 5, all cells were transferred to GREX plate (Wilson Wolf, Cat. 80240M) for expansion with TCAM media composed of CTS OpTmizer T Cell Expansion SFM (Gibco, Cat. A3705001) containing 2.5% (v/v) of Human AB Serum, 1% (v/v) Glutamax (Gibco, Cat. 35050-061) and 1% (v/v) 10 1M HEPES buffer (Gibco, Cat. 15630080), 1% of Penicillin-Streptomycin, and supplemented with 100 U/mL of recombinant human interleukin-2 (Peprotech, Cat. 200-02), 5 ng/mL of human interleukin-7 (Peprotech, Cat. 200-07) and 5 ng/mL of human interleukin-15 (Peprotech, Cat. 200-15).

[1033] On day 7, each of the T cell groups was sorted on the GFP+ population, and cells were put back in culture in TCAM media composed of CTS OpTmizer T Cell Expansion SFM (Gibco, Cat. A3705001) containing 2.5% (v/v) of Human AB Serum, 1% (v/v) Glutamax (Gibco, Cat. 35050-061) and 1% (v/v) 10 1M HEPES buffer (Gibco, Cat. 15630080), 1% of Penicillin-Streptomycin, and supplemented with 100 U/mL of recombinant human interleukin-2 (Peprotech, Cat. 200-02), 5 ng/mL of human interleukin-7 (Peprotech, Cat. 200-07) and 5 ng/mL of human interleukin-15 (Peprotech, Cat. 200-15).

[1034] On day 8, sorted cells were activated with TransAct™ (1:100 dilution, Miltenyi Biotec), and edited with LNP formulations to disrupt the TRAC gene. Briefly, LNPs for each Nme2 BC22 mRNA (mRNA100418), UGI mRNA (mRNA100032) and sgRNA G028939 targeting TRAC were formulated as described in Example 1. LNP compositions were incubated in TCAM with cytokines as described above supplemented with 20 μg/mL recombinant human ApoE3 (Peprotech, Cat. 350-02). An equal volume of LNP mix was added to one million activated T cells to yield a final concentration of 0.209 μg total LNP/mL for the TRAC LNP.

[1035] On day 10, all cells were transferred to GREX plate (Wilson Wolf, Cat. 80240M) for expansion with TCAM media composed of CTS OpTmizer T Cell Expansion SFM (Gibco, Cat. A3705001) containing 2.5% (v/v) of Human AB Serum, 1% (v/v) Glutamax (Gibco, Cat. 35050-061) and 1% (v/v) 10 1M HEPES buffer (Gibco, Cat. 15630080), 1% of Penicillin-Streptomycin, and supplemented with 100 U/mL of recombinant human interleukin-2 (Peprotech, Cat. 200-02), 5 ng/mL of human interleukin-7 (Peprotech, Cat. 200-07) and 5 ng/mL of human interleukin-15 (Peprotech, Cat. 200-15).

[1036] Half of the media from the GREX wells was replaced with fresh TCEM supplemented with cytokines on Days 12 and 14.

[1037] On day 17, an aliquot of cells was stained by flow cytometry antibodies to determine HLA-A2 expression (HLA-A+), HLA-B8 expression (HLA-B8+), HLA-Class-I expression (MHC I+) following knockout of B2M, HLA-Class-II expression (MHC II+) following knockout of CIITA, and CD3 expression following knockout of TRAC. T cells were incubated with an antibody cocktail targeting the following molecules: HLA-A2 (B eBioscience, Cat. 17-9876-42), HLA-B8 (Miltenyi Biotec, Cat. 130-118-960), CD3 (Biolegend, Cat. 317334), CD4 (Biolegend, Cat. 300536), CD8 (Biolegend, Cat. 344740), HLA-DR, DP, DQ (HLA Class-II) (Biolegend, Cat. 361712), HLA-E (Biolegend, Cat. 342612), and ViaKrome 808 Fixable Viability Dye (Beckman Coulter, Cat. C36628). Cells were subsequently washed, analyzed on a Cytoflex LX instrument (Beckman Coulter) using the FlowJo software package. The rest of the cells were frozen down for subsequent T cell injections in mice using a 1:1 dilution for CSB (Stemcells, 100-0237) and CS10 (Stemcells, 7930).

14.2. HLA-A and/or HLA-B with CIITA Knockout T Cells Show Greater Protection from NK Killing than B2M/CIITA KO T Cells

[1038] NK cells were isolated from a leukopak by methods known in the art, washed with HBSS (Gibco, Cat. No. 14025-092) and resuspended at 10×10⁶ cells/mL for injection in 150 μL HBSS. Thirty female NOG-hIL-15 mice (Taconic) were dosed by tail vein injection with 1.5×10⁶ isolated NK cells. An additional twenty-five female NOG-hIL-15 served NK-non-injected controls.

[1039] Twenty-seven days after NK cell injection, mice were injected with unedited or engineered T cells as described in Table 29. Briefly, engineered T cells were injected 16 days post first activation after washing in PBS and resuspending in HBSS solution at a concentration of 6.0×10⁶ cells/150 μL.

[1040] IVIS imaging of live mice was performed to identify luciferase-positive T cells by IVIS spectrum. IVIS imaging was done at 24 hours, 7 days, 14 days, 16 days, 19 days, 22 days, 26 days, 29 days, 33 days, 36 days, 43 days, 49 days, and 61 days after T cell injection. Mice were prepared for imaging with an injection of D-luciferin i.p. at 10 μL/g body weight per the manufacturer's recommendation, about 150 μL per animal. Animals were anesthetized and then placed in the IVIS imaging unit. The visualization was performed with the exposure time set to auto, field of view D, medium binning, and F/stop set to 1. Table 30 and FIG. 11 shows total flux (photons/s) from luciferase expressing T cells present at the various time points after injection. In vivo, B32M edited cells showed sensitivity to NK killing, while HLA-A, HLA-B, TRAC and CIITA edited cells (as shown in Table 29) showed protection from NK mediated lysis.

TABLE 30
Total Flux (photons/s) from luciferase expressing T cells in
treated mice at intervals after T cell injection.

| | Days | | | | | | |
|---|---|---|---|---|---|---|---|
| | post | | | | | | |
| | T cell | | | | | | |
| | injec- | No NK injection | | | NK injection | | |
| Group | tion | Mean | SD | N | Mean | SD | N |
| TRAC | 1 | 1.03E+08 | 1.70E+07 | 4 | 7.70E+07 | 1.04E+07 | 5 |
| KO | 7 | 2.15E+08 | 1.36E+07 | 4 | 1.57E+08 | 2.85E+07 | 5 |
| | 14 | 2.66E+08 | 4.04E+07 | 4 | 3.01E+08 | 5.64E+07 | 5 |
| | 16 | 3.27E+08 | 4.84E+07 | 4 | 1.69E+08 | 4.40E+07 | 5 |
| | 19 | 2.57E+08 | 5.99E+07 | 4 | 2.22E+08 | 7.06E+07 | 5 |
| | 22 | 2.74E+08 | 3.40E+07 | 4 | 2.38E+08 | 1.19E+08 | 5 |
| | 26 | 2.33E+08 | 3.74E+07 | 4 | 2.45E+08 | 1.45E+08 | 5 |
| | 29 | 2.39E+08 | 5.41E+07 | 4 | 2.70E+08 | 1.46E+08 | 5 |
| | 33 | 1.85E+08 | 4.72E+07 | 4 | 2.42E+08 | 1.47E+08 | 5 |
| | 36 | 1.62E+08 | 1.71E+07 | 4 | 2.67E+08 | 1.51E+08 | 5 |
| | 43 | 2.05E+08 | 6.97E+07 | 4 | 3.45E+08 | 2.75E+08 | 5 |
| | 49 | 2.62E+08 | 1.85E+08 | 4 | 4.34E+08 | 3.66E+08 | 5 |
| | 61 | 2.07E+08 | 1.80E+08 | 4 | 2.63E+09 | 3.35E+09 | 5 |
| B2M | 1 | 7.23E+07 | 1.05E+07 | 4 | 7.14E+06 | 1.44E+06 | 5 |
| | 7 | 8.40E+07 | 1.00E+07 | 4 | 5.57E+06 | 7.80E+05 | 5 |
| | 14 | 1.07E+08 | 1.65E+07 | 4 | 4.06E+06 | 6.93E+05 | 5 |
| | 16 | 8.41E+07 | 2.04E+07 | 4 | 4.05E+06 | 5.02E+05 | 5 |
| | 19 | 1.38E+08 | 3.78E+07 | 4 | 2.96E+06 | 2.46E+05 | 5 |
| | 22 | 6.59E+07 | 1.77E+07 | 4 | 3.38E+06 | 4.43E+05 | 5 |
| | 26 | 5.09E+07 | 2.33E+07 | 4 | 3.26E+06 | 4.57E+05 | 5 |
| | 29 | 5.20E+07 | 1.76E+07 | 4 | 3.11E+06 | 5.11E+05 | 5 |
| | 33 | 4.86E+07 | 1.75E+07 | 4 | 2.65E+06 | 2.23E+05 | 5 |
| | 36 | 3.13E+07 | 7.28E+06 | 4 | 2.64E+06 | 2.87E+05 | 5 |
| | 43 | 3.96E+07 | 1.47E+07 | 4 | 2.10E+06 | 2.80E+05 | 5 |
| | 49 | 3.56E+07 | 3.23E+06 | 4 | 2.18E+06 | 2.29E+05 | 5 |
| | 61 | 1.94E+07 | 3.89E+06 | 4 | 1.86E+06 | 2.74E+05 | 5 |
| HLA-A | 1 | 5.93E+07 | 5.19E+06 | 4 | 5.92E+07 | 1.01E+07 | 5 |
| | 7 | 1.99E+08 | 2.97E+07 | 4 | 1.80E+08 | 4.31E+07 | 5 |
| | 14 | 3.23E+08 | 8.66E+07 | 4 | 3.01E+08 | 9.32E+07 | 5 |
| | 16 | 3.05E+08 | 9.72E+07 | 4 | 3.13E+08 | 8.01E+07 | 5 |
| | 19 | 1.88E+08 | 3.55E+07 | 4 | 3.41E+08 | 1.10E+08 | 5 |
| | 22 | 2.75E+08 | 2.41E+07 | 4 | 4.14E+08 | 1.68E+08 | 5 |
| | 26 | 1.89E+08 | 3.99E+07 | 4 | 3.24E+08 | 1.40E+08 | 5 |
| | 29 | 1.67E+08 | 4.29E+07 | 4 | 3.60E+08 | 1.65E+08 | 5 |
| | 33 | 1.67E+08 | 4.25E+07 | 4 | 3.03E+08 | 1.59E+08 | 5 |
| | 36 | 1.91E+08 | 5.23E+07 | 4 | 2.63E+08 | 1.43E+08 | 5 |
| | 43 | 1.17E+08 | 2.24E+07 | 4 | 2.62E+08 | 1.50E+08 | 5 |
| | 49 | 6.79E+07 | 1.14E+07 | 4 | 2.64E+08 | 1.27E+08 | 5 |
| | 61 | 6.99E+07 | 2.02E+07 | 4 | 4.09E+08 | 2.92E+08 | 5 |
| HLA-B | 1 | 7.56E+07 | 4.17E+07 | 4 | 6.13E+07 | 8.43E+06 | 5 |
| | 7 | 1.81E+08 | 1.85E+07 | 4 | 8.47E+07 | 1.53E+07 | 5 |
| | 14 | 1.04E+08 | 9.88E+06 | 4 | 9.54E+07 | 8.16E+06 | 5 |
| | 16 | 9.11E+07 | 5.68E+06 | 4 | 1.01E+08 | 2.80E+07 | 5 |
| | 19 | 1.90E+08 | 2.08E+07 | 4 | 7.30E+07 | 1.48E+07 | 5 |
| | 22 | 9.67E+07 | 3.17E+06 | 4 | 1.00E+08 | 2.37E+07 | 5 |
| | 26 | 1.08E+08 | 2.21E+07 | 4 | 7.96E+07 | 2.17E+07 | 5 |
| | 29 | 7.63E+07 | 1.59E+07 | 4 | 5.30E+07 | 8.34E+06 | 5 |
| | 33 | 5.77E+07 | 1.32E+07 | 4 | 7.60E+07 | 2.91E+07 | 5 |
| | 36 | 5.23E+07 | 9.16E+06 | 4 | 7.50E+07 | 3.48E+07 | 5 |
| | 43 | 5.72E+07 | 8.07E+06 | 4 | 8.64E+07 | 4.06E+07 | 5 |
| | 49 | 7.81E+07 | 3.27E+07 | 4 | 6.60E+07 | 3.65E+07 | 5 |
| | 61 | 4.10E+07 | 7.65E+06 | 4 | 6.60E+07 | 4.21E+07 | 5 |
| HLA- | 1 | 6.89E+07 | 5.43E+06 | 4 | 8.32E+07 | 6.69E+06 | 5 |
| AB | 7 | 8.96E+07 | 8.11E+06 | 4 | 1.53E+08 | 1.17E+08 | 5 |
| | 14 | 1.13E+08 | 1.06E+07 | 4 | 4.65E+08 | 6.03E+08 | 5 |
| | 16 | 7.28E+07 | 1.70E+07 | 4 | 6.94E+08 | 9.88E+08 | 5 |
| | 19 | 9.11E+07 | 2.35E+07 | 4 | 1.27E+09 | 2.15E+09 | 5 |
| | 22 | 1.20E+08 | 5.52E+07 | 4 | 2.58E+09 | 4.72E+09 | 5 |
| | 26 | 9.65E+07 | 5.94E+07 | 4 | 2.95E+09 | 5.40E+09 | 5 |
| | 29 | 8.27E+07 | 5.16E+07 | 4 | 3.10E+09 | 5.72E+09 | 5 |
| | 33 | 5.52E+07 | 3.10E+07 | 4 | 1.66E+08 | 1.11E+08 | 5 |
| | 36 | 7.34E+07 | 8.04E+07 | 4 | 1.47E+08 | 9.66E+07 | 5 |
| | 43 | 1.55E+08 | 2.13E+08 | 4 | 1.60E+08 | 9.99E+07 | 5 |
| | 49 | 2.02E+08 | 3.05E+08 | 4 | 1.29E+08 | 5.71E+07 | 5 |
| | 61 | 1.53E+09 | 2.56E+09 | 4 | 3.08E+08 | 3.14E+08 | 5 |
| NK only | 1 | | | | 8.88E+05 | 8.15E+04 | 5 |
| | 7 | | | | 9.56E+05 | 4.69E+04 | 5 |
| | 14 | | | | 1.03E+06 | 9.95E+04 | 5 |
| | 16 | | | | 1.28E+06 | 1.22E+05 | 5 |
| | 19 | | | | 1.06E+06 | 5.24E+04 | 5 |
| | 22 | | | | 1.38E+06 | 1.30E+05 | 5 |
| | 26 | | | | 1.24E+06 | 1.03E+05 | 5 |
| | 29 | | | | 1.14E+06 | 1.48E+05 | 5 |
| | 33 | | | | 1.32E+06 | 1.81E+05 | 5 |
| | 36 | | | | 1.24E+06 | 8.79E+04 | 5 |
| | 43 | | | | 1.17E+06 | 9.95E+04 | 5 |
| | 49 | | | | 1.25E+06 | 1.65E+05 | 5 |
| | 61 | | | | 9.40E+05 | 3.32E+04 | 5 |
| HBSS | 1 | 9.41E+05 | 7.08E+04 | 5 | | | |
| | 7 | 9.77E+05 | 9.09E+04 | 5 | | | |
| | 14 | 8.80E+05 | 4.23E+04 | 5 | | | |
| | 16 | 1.15E+06 | 7.44E+04 | 5 | | | |
| | 19 | 8.56E+05 | 1.00E+05 | 5 | | | |
| | 22 | 1.19E+06 | 2.02E+05 | 5 | | | |
| | 26 | 1.19E+06 | 9.09E+04 | 5 | | | |
| | 29 | 9.74E+05 | 8.72E+04 | 5 | | | |
| | 33 | 1.07E+06 | 6.09E+04 | 5 | | | |
| | 36 | 1.10E+06 | 8.36E+04 | 5 | | | |
| | 43 | 9.89E+05 | 5.35E+04 | 5 | | | |
| | 49 | 1.12E+06 | 1.46E+05 | 5 | | | |
| | 61 | 9.24E+05 | 7.21E+04 | 5 | | | |

### Example 15: In Vivo NK Cell Killing of Engineered T Cells in a Mouse Model

[1041] Female NOG-hIL-15 mice were engrafted with 1.5×10⁶ primary NKI cells. Engineered T cells containing luciferase and edited according to Table 29 (various combinations of HLA-A/HLA-B/TRAC/CIITA KO) were injected 4 weeks later in order to assess protection of the engineered T cells from NKI cell killing.

### 15.1. Preparation of T Cells Containing Luciferase +/−B2M/HLA-A/HLA-B/TRAC/CIITA KO and HD1 TCR

[1042] T cells were prepared as in Example 14.1 except on day 4, the edit was performed with LNPs co-formulated with Spy Cas9 mRNA gRNA G027994 targeting the HLA-B gene.

15.2. HLA-A and/or HLA-B with CIITA Knockout T Cells Show Greater Protection from NK Killing than B2M/CIITA KO T Cells

[1043] The NK cells and mice were prepared as in Example 14.2.

[1044] IVIS imaging of live mice was performed to identify luciferase-positive T cells by IVIS spectrum. IVIS imaging was done at 24 hours, 7 days, 14 days, 16 days, 19 days, 22 days, 26 days, 29 days, 33 days, 36 days, and 40 days after T cell injection. Mice were prepared for imaging as in Example 14.2. Table 31 and FIG. 12 shows total flux (photons/s) from luciferase expressing T cells present at the various time points after injection. In vivo, B32M edited cells showed sensitivity to NK killing, while HLA-A, HLA-B, TRAC and CIITA edited cells (as shown in Table 29) showed protection from NK mediated lysis.

TABLE 31
Total Flux (photons/s) from luciferase expressing T cells in treated
mice at indicated days after T cell injection.

| | | No NK injection | | | NK injection | | |
|---|---|---|---|---|---|---|---|
| Group | Days | Mean | SD | N | Mean | SD | N |
| TRAC | 1 | 60237500 | 19287091 | 4 | 78610000 | 5481726 | 5 |
| KO | 5 | 79142500 | 21375333 | 4 | 42522000 | 7716803 | 5 |
| | 8 | 48687500 | 4504023 | 4 | 50922000 | 5762317 | 5 |
| | 18 | 28987500 | 7896542 | 4 | 59024000 | 19425221 | 5 |
| | 22 | 38695000 | 11931246 | 4 | 69482000 | 23737977 | 5 |
| | 26 | 62917500 | 12062851 | 4 | 54070000 | 21862370 | 5 |
| | 29 | 59235000 | 17354556 | 4 | 1.05E+08 | 51444384 | 5 |
| | 33 | 70220000 | 18308445 | 4 | 81094000 | 30428047 | 5 |
| | 36 | 38415000 | 10687349 | 4 | 1.06E+08 | 50005246 | 5 |
| | 40 | 40777500 | 8983302 | 4 | 1.66E+08 | 1.14E+08 | 5 |
| B2M | 1 | 61697500 | 3710178 | 4 | 4625200 | 1017123 | 5 |
| | 5 | 40126000 | 7705511 | 4 | 2337400 | 244229.9 | 5 |
| | 8 | 66758000 | 14162942 | 4 | 2650600 | 417803.6 | 5 |
| | 18 | 44676000 | 16960004 | 4 | 2997800 | 477095.1 | 5 |
| | 22 | 56008000 | 25277849 | 4 | 2953600 | 344565 | 5 |
| | 26 | 71536000 | 36732385 | 4 | 2469720 | 916718.8 | 5 |
| | 29 | 64236000 | 29804451 | 4 | 3688200 | 846342.1 | 5 |
| | 33 | 64786000 | 33498350 | 4 | 2378200 | 408716.7 | 5 |
| | 36 | 70582000 | 38523286 | 4 | 2803200 | 512631 | 5 |
| | 40 | 59696000 | 33547829 | 4 | 2952000 | 459698.6 | 5 |
| HLA-A | 1 | 1.03E+08 | 18126125 | 4 | 72340000 | 10886537 | 5 |
| | 5 | 67105000 | 14635427 | 4 | 47038000 | 4848218 | 5 |
| | 8 | 68767500 | 7969433 | 4 | 40606000 | 10750222 | 5 |
| | 18 | 38107500 | 9255540 | 4 | 96062000 | 25313313 | 5 |
| | 22 | 56917500 | 7445550 | 4 | 1.1E+08 | 60299107 | 5 |
| | 26 | 44572500 | 8581807 | 4 | 2.89E+08 | 1.86E+08 | 5 |
| | 29 | 60602500 | 18917399 | 4 | 5.74E+08 | 5.45E+08 | 5 |
| | 33 | 83882500 | 30944594 | 4 | 6.68E+08 | 6.13E+08 | 5 |
| | 36 | 75797500 | 29148427 | 4 | 1.42E+09 | 1.44E+09 | 5 |
| | 40 | 1.09E+08 | 61468496 | 4 | 1.7E+09 | 1.83E+09 | 5 |
| HLA-B | 1 | 75120000 | 13263039 | 4 | 95964000 | 11361716 | 5 |
| | 5 | 1.14E+08 | 2656478 | 4 | 54178000 | 11174948 | 5 |
| | 8 | 1.53E+08 | 30114147 | 4 | 86706000 | 15060945 | 5 |
| | 18 | 1.12E+08 | 19480373 | 4 | 70712000 | 17193704 | 5 |
| | 22 | 1.29E+08 | 23319638 | 4 | 1.31E+08 | 28386687 | 5 |
| | 26 | 2.18E+08 | 1.76E+08 | 4 | 1.02E+08 | 36123989 | 5 |
| | 29 | 3.19E+08 | 4.79E+08 | 4 | 1.79E+08 | 1.28E+08 | 5 |
| | 33 | 4.15E+08 | 6.04E+08 | 4 | 3.96E+08 | 4.33E+08 | 5 |
| | 36 | 5.16E+08 | 7.64E+08 | 4 | 6.5E+08 | 7.98E+08 | 5 |
| | 40 | 8.16E+08 | 1.3E+09 | 4 | 1.2E+09 | 1.63E+09 | 5 |
| HLA-AB | 1 | 54503800 | 31113691 | 4 | 40374000 | 5322889 | 5 |
| | 5 | 79315000 | 10423954 | 4 | 41694000 | 7467100 | 5 |
| | 8 | 79832500 | 12777999 | 4 | 34938000 | 8491715 | 5 |
| | 18 | 55077500 | 14565978 | 4 | 64404000 | 21336274 | 5 |
| | 22 | 46923250 | 33468493 | 4 | 43546000 | 16951128 | 5 |
| | 26 | 52755000 | 25167748 | 4 | 54498000 | 15582203 | 5 |
| | 29 | 66772500 | 37915812 | 4 | 51224000 | 14570855 | 5 |
| | 33 | 64415000 | 41401597 | 4 | 54594000 | 25814216 | 5 |
| | 36 | 52932500 | 30505738 | 4 | 52580000 | 16331823 | 5 |
| | 40 | 56737500 | 39401755 | 4 | 61682000 | 21887079 | 5 |
| NK only | 1 | | | | 1659800 | 144107.5 | 5 |
| | 5 | | | | 1252000 | 143766 | 5 |
| | 8 | | | | 1468667 | 21746.01 | 5 |
| | 18 | | | | 1321667 | 85253.87 | 5 |
| | 22 | | | | 1393333 | 114106.2 | 5 |
| | 26 | | | | 1329000 | 97857.04 | 5 |
| | 29 | | | | 1786000 | 227694.2 | 5 |
| | 33 | | | | 1290667 | 190931.6 | 5 |
| | 36 | | | | 1475000 | 197293.4 | 5 |
| | 40 | | | | 1505333 | 81667.35 | 5 |
| HBSS | 1 | 1335000 | 150939.7 | 5 | | | |
| | 5 | 1086560 | 154003 | 5 | | | |
| | 8 | 1116000 | 43446.52 | 5 | | | |
| | 18 | 1023540 | 60430.84 | 5 | | | |
| | 22 | 1214800 | 96373.03 | 5 | | | |
| | 26 | 1295000 | 109750.6 | 5 | | | |
| | 29 | 1145520 | 120455 | 5 | | | |
| | 33 | 1211400 | 60546.18 | 5 | | | |
| | 36 | 1319200 | 85889.23 | 5 | | | |
| | 40 | 1357000 | 112189.1 | 5 | | | |

### Example 16: Functional Analysis of T Cells with Double/Triple Knockout (KO) Edits and Expressing Anti-CD30 CAR-T

### 16.1. Engineering T Cells

[1045] Upon thaw (day 0), CD4+CD8+ T cells (Cellex) at a ratio of 1:1 were plated at a density of ˜1.2×10⁶ cells/mL in T cell activation media (TCAM) composed of CTS OpTmizer T cell Expansion SFM (Gibco, Cat. A3705001) containing CTS Supplement, 2.5% (v/v) of Human AB Serum (Valley Biomedical, HP1022HI), 1× Glutamax (Gibco, Cat. 35050-061), 10 mM HEPES buffer, 1% of Penicillin-Streptomycin, and 200 IU/mL of recombinant human interleukin-2 (Peprotech, Cat. 200-02), 5 ng/mL of recombinant human interleukin-7 (Peprotech, Cat. 200-07), and 5 ng/mL of recombinant human interleukin-15 (Peprotech, Cat. 200-15). Cells were incubated in a 37° C. incubator overnight.

[1046] 24 hours post thaw (day 1), cells were counted and resuspended at 1×10⁶ cells/mL in TCAM. Cells were activated with TransAct™ (1:100 dilution, Miltenyi Biotec).

[1047] Different T cell groups were edited as described in Table 32. Briefly, LNP compositions containing 1) Nme2 BC22 mRNA and 2) sgRNA G034202 targeting HLA-A; or sgRNA G034201 targeting CIITA; or sgRNA G025420 targeting TRAC; or sgRNA G034209 targeting HLA-B. UGI mRNA LNP was separately formulated. See Example 1 describing LNP formulation.

TABLE 32
Editing scheme and viral transduction

| Condition | Day 0 | Day 1 | Day 3 | Day 5 |
|---|---|---|---|---|
| CD30 CAR | Thaw | TransAct | Nme2 BC22 HLA-A + | GREX 6 |
| Double KO | | | CIITA + Spy Cas9 | transfer |
| | | | TRAC + AAV | |
| CD30 CAR | Thaw | TransAct | Nme2 BC22 HLA-A + | GREX 6 |
| Triple KO | | | CIITA + HLA-B + | transfer |
| | | | Spy Cas9 TRAC + | |
| | | | AAV | |
| Untransduced/ | Thaw | TransAct | Spy Cas9 TRAC | GREX 6 |
| TCR KO only | | | | transfer |
| Unedited | Thaw | TransAct | | GREX 6 |
| | | | | transfer |

[1048] On day 3, cells were counted and resuspended in TCAM with cytokines as described above at 1×10⁶ cells/mL. A mixture of LNP, ApoE, AAV in TCAM was prepared at 2× concentration such that when equal volume of LNP mix was added to the T cells the concentration would be 1.5 μg/mL for each HLA-A, CIITA, or HLA-B sgRNA, with BC22 mRNA co-formulation LNPs, 0.2 μg/mL for UGI mRNA LNP, 1 μg/mL for TRAC sgRNA LNP, 10 μg/mL for ApoE, 1E5 GC/cell for AAV and the cells would be at final density 0.5×10⁶ cells/mL. Cells were incubated in a 37° C. incubator overnight.

[1049] 24 hours post transfection (day 4), cells were counted and again brought to 0.5×10⁶ cells/mL density.

[1050] 48 hours post transfection, (day 5) cells were cultured in 6-well GREX (Wilson Wolf, Cat. 80240M) in T cell expansion media (TCEM) composed of CTS OpTmizer T cell Expansion SFM (Gibco, Cat. A3705001) containing CTS Supplement, 5% (v/v) of Human AB Serum (Valley Biomedical, HP1022HI), 1× Glutamax (Gibco, Cat. 35050-061), 10 mM HEPES buffer, 1% of Penicillin-Streptomycin, and 200 IU/mL of recombinant human interleukin-2 (Peprotech, Cat. 200-02), 5 ng/mL of recombinant human interleukin-7 (Peprotech, Cat. 200-07), and 5 ng/mL of recombinant human interleukin-15 (Peprotech, Cat. 200-15). Cells were cultured till day 9 with regular media changes.

[1051] Additionally, T cells were also engineered to disrupt B2M and CIITA, to generate a double KO of these two genes.

[1052] Upon thaw (day 0), Donor DR26 T cells (Cellex) were plated at a density of ˜1.5×10⁶ cells/mL in T cell activation media (TCAM) composed of CTS OpTmizer T cell Expansion SFM (Gibco, Cat. A3705001) containing CTS Supplement, 2.5% (v/v) of Human AB Serum (Valley Biomedical, HP1022HI), 1× Glutamax (Gibco, Cat. 35050-061), 10 mM HEPES buffer, 1% of Penicillin-Streptomycin, and 200 IU/mL of recombinant human interleukin-2 (Peprotech, Cat. 200-02), 5 ng/mL of recombinant human interleukin-7 (Peprotech, Cat. 200-07), and 5 ng/mL of recombinant human interleukin-15 (Peprotech, Cat. 200-15). Cells were rested in a 37° C. incubator overnight.

[1053] Different T cell groups were edited as described in Table 33. Briefly, LNP compositions containing sgRNA G000529 (SEQ ID NO: 993) targeting B2M and sgRNA G013675 (SEQ ID NO: 3118) targeting CIITA.

TABLE 33
Order of editing and Harvest

| Condition | Day 0 | Day 1 | Day 2 | Day 3 | Day 8 |
|---|---|---|---|---|---|
| B2M + | Thaw | TransAct + | B2M | 24-well Grex | Harvest |
| CIITA | | CIITA | | transfer | |
| Unedited | Thaw | TransAct | | 24-well Grex | Harvest |
| | | | | transfer | |

[1054] 24 hrs post thaw (day 1), cells were counted and resuspended in TCAM with cytokines as described above at 2×10⁶ cells/mL. Cells were activated with TransAct™ (1:100 dilution, Miltenyi Biotec). A mixture of LNP and ApoE3 in TCAM was prepared at 2× concentration such that when equal volume of LNP mix was added to T cells, the concentration would be 1.25 μg/mL for CIITA sgRNA formulation LNPs, and 2.5 μg/mL for ApoE and cell density would be 1×10⁶ cells/mL. Cells were incubated in a 37° C. incubator overnight.

[1055] On day 2, cells were counted and again brought to 1×10⁶ cells/mL density. A mixture of LNP and ApoE3 in TCAM was prepared at 10× concentration such that when equal volume of LNP mix was added to T cells resuspended at 1×10⁶ cells/mL, the concentration would be 2.5 μg/mL for B2M and 2.5 μg/mL for ApoE3. Cells were incubated in a 37° C. incubator overnight

[1056] 24 hours later (on day 3) cells were cultured in 24-well GREX (Wilson Wolf, Cat. 80192M) in T cell expansion media (TCEM) composed of CTS OpTmizer T cell Expansion SFM (Gibco, Cat. A3705001) containing CTS Supplement, 5% (v/v) of Human AB Serum (Valley Biomedical, HP1022HI), 1× Glutamax (Gibco, Cat. 35050-061), 10 mM HEPES buffer, 1% of Penicillin-Streptomycin, and 200 IU/mL of recombinant human interleukin-2 (Peprotech, Cat. 200-02), 5 ng/mL of recombinant human interleukin-7 (Peprotech, Cat. 200-07), and 5 ng/mL of recombinant human interleukin-15 (Peprotech, Cat. 200-15). Cells were cultured until day 8 with regular media changes and frozen down on day 8.

### Example 16.2. Tumor Cell Killing Assay Using Engineered T Cells Expressing Anti-CD30 CAR-T Cells and with Double and Triple Knockout Edits

[1057] T cells were engineered with anti-CD30 CAR constructs and different edits as described in Example 16.1 and were tested for their cytotoxicity against CD30 expressing HH and MOLT-4 tumor cell lines. HH cells and MOLT-4 cells were thawed and maintained in culture for at least 7 days before setting up the killing assay. CD30 CAR-T cells and control T-cells were removed from liquid nitrogen, thawed, and rested overnight in pre-warmed T cell media. The killing assay was setup the following day by first seeding 20,000 cells/well of HH or MOLT-4 cells in 100 μL in a 96 well plate. CD30-CAR T-cells and control T-cells were counted, centrifuged, and resuspended in T-cell media without any cytokines. They were then serially diluted 3-fold starting with E:T ratio of 3.3 and then diluted up to 5 points. They were then added to target cells to their respective wells and kept in incubator at 37° C.

[1058] Bright-Glo™ Luciferase Assay System (Promega, Cat. E2620) was pre-thawed in dark at room temperature. The killing assay plate was taken out from the incubator. 50 μL of Bright-Glo™ Luciferase Assay System was added to each well and the plate was shaken briefly on a shaker and then incubated in dark at room temperature for 5 minutes. The plate was then read for luminescence with a CLARIOstar plate reader. The percentage killing was calculated from the luminescence with the average of T cell to tumor cell ratio 0 as 0% killing. The percent killing results are shown in for HH cells in Table 34 and FIG. 13A and the percent killing results for MOLT-4 cells are shown in Table 35 and FIG. 13B.

TABLE 34
percentage killing in HH cells for double and triple KO edits

| | Untransduced | | Double KO | | Triple KO | |
|---|---|---|---|---|---|---|
| | Mean % | SD % | Mean % | SD % | Mean % | SD % |
| E:T | Killing | Killing | Killing | Killing | Killing | Killing |
| 3.33 | 13.48 | 2.23 | 99.94 | 0.02 | 99.92 | 0.04 |
| 1.11 | 11.84 | 0.42 | 99.53 | 0.12 | 99.26 | 0.13 |
| 0.37 | 2.71 | 1.91 | 91.74 | 0.65 | 85.62 | 0.81 |
| 0.12 | −0.93 | 0.57 | 56.45 | 0.02 | 51.78 | 2.09 |
| 0.04 | −3.92 | 1.43 | 31.10 | 2.18 | 31.44 | 2.59 |

TABLE 35
percentage killing in MOLT-4 cells for double and triple KO edits

| | Untransduced | | Double KO | | Triple KO | |
|---|---|---|---|---|---|---|
| | Mean % | SD % | Mean % | SD % | Mean % | SD % |
| E:T | Killing | Killing | Killing | Killing | Killing | Killing |
| 3.33 | 32.73 | 0.48 | 97.37 | 0.17 | 97.29 | 0.64 |
| 1.11 | 15.28 | 1.08 | 94.08 | 0.01 | 93.36 | 0.99 |
| 0.37 | 12.97 | 0.28 | 84.65 | 1.60 | 86.61 | 0.90 |
| 0.12 | 8.90 | 0.81 | 65.51 | 2.59 | 71.31 | 1.11 |
| 0.04 | 8.79 | 0.72 | 34.37 | 0.95 | 44.03 | 2.53 |

### 16.3. MLR Assay

### Thawing & Resting Host PBMCs and Engineered Donor T Cells

[1059] Cryopreserved host PBMCs and engineered donor T cells as described in Table 36 were thawed at a cell concentration of 1.5×10⁶ cells/mL into T cell growth media (TCGM) composed of OpTmizer TCGM (Gibco, A1048501), Human Serum AB (GeminiBio, 100-512), HEPES 1M (Gibco, 15630-080), GlutaMAX Supplement (Gibco, 35050-061), and Penicillin-Streptomycin (Gibco, 15070-063) and further supplemented with 100 U/mL of recombinant human interleukin-2 (Peprotech, Cat. 200-02), 5 ng/mL IL-7 (Peprotech, Cat. 200-07), 5 ng/mL IL-15 (Peprotech, Cat. 200-15). Cells were rested in 37° C. incubator overnight.

TABLE 36
Donor T cells Editing Schematic and Host PBMCs

| Cell Type | | Donor | HLA-A | HLA-A | HLA-B | HLA-B | HLA-C | HLA-C |
|---|---|---|---|---|---|---|---|---|
| Donor T | WT (unedited) | Donor 1 | A*02:01 | A*02:01 | B*08:01 | B*08:01 | C*07:01 | C*07:01 |
| cells | | | | | | | | |
| | Triple KO | Donor 1 | A*02:01 | A*02:01 | B*08:01 | B*08:01 | C*07:01 | C*07:01 |
| | (HLA-A/HLA- | | | | | | | |
| | B/CIITA) | | | | | | | |
| Host | HLA-C Match | Host 1 | A*03:02 | A*03:02 | B*49:01 | B*49:01 | C*07:01 | C*07:01 |
| PBMCs | Host | | | | | | | |
| | Autologous | Auto Host | A*02:01 | A*02:01 | B*08:01 | B*08:01 | C*07:01 | C*07:01 |
| | | (Donor 1) | | | | | | |

Assay Setup with Engineered Donor T Cells and Host PBMCs

[1060] The following day, engineered donor T cells as described in Table 36 were irradiated at 5000 rad (Program C) and spun down, and each group was resuspended at 1×10⁶/mL in TCGM without cytokines. Host PBMCs will undergo CD56 depletion using CD56 microbeads from miltenyi as described in manufacturer's protocol. CD56 depleted were then counted using Nexcelom Celleca cell counter and desired number of cells were collected in a 15 mL conical tube and then spun down in a centrifuge at 500×G for 5 minutes followed by resuspending at 1×10⁶ cells/mL in phosphate buffered saline (Corning, Cat. No. 21-040-CV). A vial of Cell Trace Violet (Thermo Fisher, Cat. No. C34571) per donor was brought to room temperature and reconstituted using 20 μL DMSO to generate a stock of 5 mM CTV. A total of 10 million host PBMCs were transferred to a 50 mL conical tube and stained with 10 μL CTV at 5 μM concentration and incubated for 15 minutes in a 37° C. incubator. The labelled host cells were then spun down at 500×g for 5 minutes. CTV labelled host PBMCs were then resuspended at 1×10⁶ cells/mL in pre-warmed TCGM media composed of OpTimizer TCGM as described in Example 16.1. For the Donor+Host co-culture at 3:1 donor: host ratio, 50 μL of host PBMCs and 150 μL of donor T cells were added per each well in a sterile 96 well round bottom plate. The plate was transferred to 37° C. incubator and incubated for 6 days. On day 6 post co-culture, half the media (˜100 L) from each well was replaced with fresh media (TCGM without cytokines).

### Alloreactivity Readout by Flow Cytometry

[1061] On day 8 post co-culture, the assay plate was stained and analyzed by flow cytometry. For the staining, the plate was spun at 600×g for 3 minutes, flicked to remove media, and 100 μL of a 1:100 v/v solution of Fc blocker (Biolegend, Cat #422302) in FACS buffer (Phosphate-buffered saline (Corning, Cat. 21-040-CV), Fetal Bovine Serum (Gibco, Cat. A3840201), UltraPure 0.5M EDTA (Invitrogen, Cat. 15575-020)) was added to each well. Cells were resuspended in the Fc blocker, and the plate was incubated at room temperature for 5 minutes. T cells were incubated with an antibody cocktail targeting the following molecules: CD3 (Biolegend, Cat. 317336), CD56 (Biolegend, Cat. 362546), CD4 (Biolegend, Cat. 300518), CD8 (Biolegend, Cat. 344742) and ViaKrome 808 Fixable Viability Dye (Beckman Coulter, Cat. C36628). Each antibody was prepared at a 1:100 v/v dilution, and 100 μL of this antibody mixture was added to each sample well. The plate was protected from light by covering with an aluminum foil and incubated at 2-8° C. for 20-30 minutes. After staining, the plate was spun at 600×g for 3 minutes, flicked to remove media and washed with 200 μL of FACS buffer. The plate was washed again, and the cell pellets were resuspended in 60 μL of FACS buffer. To each well, 10 μL of Count Bright Absolute Counting Beads was added and mixed well. The plate was run and recorded on fast mode with 70 μL total volume as a stopping rule on Cytoflex flow cytometer. FIGS. 15A and 15B show the percentage of host T cell proliferation as a result of donor T cell treatment. FIG. 15A shows that, in an autologous context, host T cells co-cultured with unedited T cells (UED) or edited T cells (Triple KO) show similar proliferation as host T cells alone. FIG. 15B shows host T cells co-cultured with unedited T cells (UED) show higher proliferation due to mismatch of HLA-A and B alleles (while C is matched) as compared to host only control. Additionally, host T cells co-cultured with unedited T cells (UED) show higher proliferation due to mismatch of HLA-A and B alleles (while C is matched), as compared to triple KO engineered cells, where HLA-A and HLA-B are disrupted, and HLA-C is matched.

### In Vitro NK Cell Killing Assays

[1062] CD30-CAR T cells edited in various combinations to disrupt CIITA, HLA-A, HLA-B, and/or B2M as described in Example 16.1, were tested for their ability to resist natural killer (NK) cell mediated killing.

### Thawing & Resting Host PBMCs and Engineered Donor T Cells

[1063] Cryopreserved NK cells and donor T cells as described in Table 36 were thawed at a cell concentration of 1.5×10⁶ cells/ml into T cell growth media (TCGM) composed of OpTmizer TCGM as described in Example 16.3 and further supplemented with 100 U/mL of recombinant human interleukin-2 (Peprotech, Cat. 200-02), 5 ng/mL IL-7 (Peprotech, Cat. 200-07), 5 ng/mL IL-15 (Peprotech, Cat. 200-15) for T-cells and 500 U/mL of IL-2 only for NK cells. Cells were rested in 37° C. incubator overnight.

[1064] Flow cytometry was performed as in Example 11.2. Table 37 shows the genotypes of the donor T cells. Table 38 and FIG. 14 show the mean percentage of T cell lysis following NK cell challenge.

TABLE 37
Donor T cells and Host NK cells

| Cell Type | | Donor ID | HLA-A | HLA-A | HLA-B | HLA-B | HLA-C | HLA-C |
|---|---|---|---|---|---|---|---|---|
| | WT | Donor 1 | A*02:01 | A*02:01 | B*08:01 | B*08:01 | C*07:01 | C*07:01 |
| Donor T | B2M + CIITA | Donor 1 | A*02:01 | A*02:01 | B*08:01 | B*08:01 | C*07:01 | C*07:01 |
| cells | Triple KO | Donor 1 | A*02:01 | A*02:01 | B*08:01 | B*08:01 | C*07:01 | C*07:01 |
| | (HLA-A/HLA- | | | | | | | |
| | B/CIITA) | | | | | | | |

TABLE 38
T cell lysis following NK cell challenge

| | | | | | B2M/ | | | |
|---|---|---|---|---|---|---|---|---|
| | Unedited | | Untransduced | | CIITA KO | | Triple KO | |
| | Mean | | Mean | | Mean | | Mean | |
| | % | SD % | % | SD % | % | SD % | % | SD % |
| E:T | Killing | Killing | Killing | Killing | Killing | Killing | Killing | Killing |
| 7.00 | 18.65 | 1.91 | 20.35 | 4.88 | 87.98 | 4.50 | 23.60 | 6.93 |
| 3.50 | 20.90 | 3.11 | 39.65 | 7.42 | 89.18 | 4.07 | 23.55 | 1.48 |
| 1.75 | 16.45 | 0.21 | 22.45 | 5.59 | 83.00 | 2.97 | 25.25 | 10.68 |
| 0.88 | 13.85 | 2.62 | 19.20 | 12.16 | 69.65 | 11.81 | 32.85 | 2.76 |
| 0.44 | 12.20 | 2.69 | 16.50 | 1.70 | 44.90 | 0.42 | 24.45 | 6.86 |
| 0.22 | 10.70 | 0.28 | 13.70 | 2.69 | 24.00 | 0.00 | 22.60 | 2.26 |

### Example 17: Double and Triple Knockout Edits in Differentiated iPSC Cells

[1065] iPSCs were reprogrammed from human PBMCs at CORM (Centre for Commercialization of Regenerative Medicine). After multiple clone characterization assays, including pluripotency marker expression and karyotyping, a single iPSC clone was selected for CRISPR/Cas9 mediated gene-editing. The selected iPSC cells were edited using HLA-A guide G018995, HLA-B guide G022020, and CIITA guide G013675, to generate double knockout (HLA-A and CIITA DKO) or triple knockout (HLA-A, HLA-B, and CIITA TKO) samples.

[1066] As shown in Table 39 below, ddPCR data showed high editing efficiency in all three targets in bulk iPSC cells.

TABLE 39
Editing Efficiencies for HLA-A, CIITA, and HLA-B

| | HLA-A Editing | CIITA Editing | HLA-B Editing |
|---|---|---|---|
| | (%) | (%) | (%) |
| WT unedited | −5 | 0 | −8 |
| DKO | 87 | 84 | N/A |
| TKO | 87 | 84 | 79 |

[1067] After single cell plating, clonal expansion, and clone characterization, a DKO or TKO iPSC clone was further selected to differentiate into cardiomyocytes or pancreatic progenitors. Differentiation was also carried out at CCRM.

[1068] Differentiated cardiomyocytes and pancreatic progenitors were verified at CCRM. Briefly, the differentiated cardiomyocytes were assayed for a cardiac marker. More than 80% of the differentiated iPSCs from different groups (wild type, DKO, and TKO) were positive for cardiac Troponin (cTNT), a cardiac marker. Similarly, after differentiation, more than 80% wild type or TKO cells were observed to express pancreatic and duodenal homeobox 1 (PDX1) and NK6 homeobox 1 (NKX6.1), two key transcription factors that drive the development of beta cells. These data suggest DKO or TKO iPSCs have comparable differentiation capability as wild type iPSCs.

1. An engineered human cell, which has reduced or eliminated surface expression of:
I) HLA-A and HLA-B protein relative to an unmodified cell, comprising a genetic modification in the HLA-A gene and a genetic modification in the HLA-B gene, wherein the cell is homozygous for HLA-C;
II) HLA-A and HLA-B protein relative to an unmodified cell, comprising a genetic modification in the HLA-A gene and a genetic modification in the HLA-B gene, wherein
(i) the genetic modification in the HLA-A gene comprises at least one nucleotide within the genomic coordinates chosen from: (a) chr6:29942854-chr6:29942913 and chr6:29943518-chr6:29943619, and (b) chr6:29942540-29945459, and
(ii) the genetic modification in the HLA-B gene comprises at least one nucleotide within the genomic coordinates chosen from: (a) chr6:31354480-31357174 or (b) chr6:31354497-31357157;
III) HLA-B protein relative to an unmodified cell, comprising a genetic modification in the HLA-B gene, wherein the cell is homozygous for HLA-A and homozygous for HLA-C: or
IV) HLA-B protein relative to an unmodified cell, comprising a genetic modification in the HLA-B gene, wherein the genetic modification comprises at least one nucleotide within the genomic coordinates chosen from: (a) chr6:31354480-31357174 and (b) chr6:31354497-31357157.

2. (canceled)

3. (canceled)

4. (canceled)

5. The engineered human cell of claim 1, wherein the cell has reduced or eliminated expression of:
a) at least one HLA-B allele selected from HLA-B7, HLA-B8, HLA-B35, HLA-B40, HLA-B44, HLA-B15, HLA-B14, HLA-B18 and HLA-B51; and/or
b) at least one HLA-A allele selected from: HLA-A1, HLA-A2, HLA-A3, HLA-A11, HLA-A29, HLA-A26, HLA-A33, and HLA-A24.

6. (canceled)

7. The engineered human cell of claim 1, wherein the genetic modification in the HLA-B gene comprises at least one nucleotide within the genomic coordinates chosen from: (a) chr6:31355182-31355596; (b) chr6:31355203-31356461;
(c) chr6:31355182-31355202 chr6:31355348-31355368; chr6:31355180-31355200; chr6:31355145-31355165; chr6:31355349-31355369; chr6:31355157-31355177; chr6:31356381-31356401; chr6:31356380-31356400; chr6:31355204-31355224; chr6:31355205-31355225; chr6:31355185-31355205; chr6:31355191-31355211; chr6:31355192-31355212; chr6:31355190-31355210; chr6:31355193-31355213; chr6:31355198-31355218; chr6:31355320-31355340; chr6:31355319-31355339; chr6:31355178-31355198; chr6:31355347-31355367; chr6:31355432-31355452; chr6:31355340-31355360; chr6:31355576-31355596; chr6:31355410-31355430; chr6:31355419-31355439; chr6:31355414-31355434; and chr6:31355409-31355429;
(d) chr6:31355222-31355246; chr6:31356777-31356801: chr6:31355492-31355516; chr6: 31355379-31355403; chr6:31355491-31355515; chr6:31355361-31355385; chr6:31355356-31355380; chr6:31355460-31355484; chr6:31357078-31357102; chr6:31355417-31355441; chr6:31355366-31355390; chr6:31355415-31355439; chr6:31355378-31355402; chr6:31355166-31355190; chr6:31355401-31355425; ch6:31355469-31355493; chr6:31356262-31356286: chr6:31355419-31355443: chr6:31355390-31355414 chr6:31355369-31355393; chr6:31355221-31355245; chr6:31355205-31355229; chr6:31355446-31355470; chr6:31356425-31356449; chr6:31355441-31355465; chr6:31355203-31355227; chr6:31356437-31356461; chr6:31356426-31356450; chr6:31356763-31356787; chr6:31356764-31356788; chr6:31356762-31356786; chr6:31355204-31355228; chr6:31356436-31356460; and chr6:31356767-31356791;
(e) chr6:31355348-31355368, chr6:31355347-31355367, chr6:31355349-31355369, chr6:31355192-31355212, chr6:31355340-31355360, and chr6:31355409-31355429; and
(f) chr6:31355222-31355246; chr6:31355221-31355245: chr6:31355205-31355229; chr6:31355446-31355470; chr6:31356425-31356449; and chr6:31355441-31355465.

8. (canceled)

9. (canceled)

10. (canceled)

11. The engineered human cell of claim 1, wherein the genetic modification in the HLA-A gene comprises at least one nucleotide within the genomic coordinates chosen from:
a) chr6:29942891-29942915: chr6:29942609-29942633: chr6:29942864-29942884;
chr6:29944266-29944290; chr6:29942889-29942913; chr6:29944471-29944495; and
chr6:29944470-29944494;
b) chr6:29942891-29942915;
c) chr6:29942864-29942884; chr6:29942868-29942888 chr6:29942876-29942896 chr6:29942877-29942897; and chr6:29942883-29942903; and
d) chr6:29942609-29942633.

12. (canceled)

13. (canceled)

14. (canceled)

15. (canceled)

16. (canceled)

17. (canceled)

18. (canceled)

19. The engineered human cell of claim 1, wherein the HLA-B expression is reduced or eliminated by:
a) a gene editing system that binds to an HLA-B genomic target sequence comprising at least 5 or at least 10 contiguous nucleotides within the genomic coordinates chosen from: chr6:31355348-31355368; or chr6:31355347-31355367; chr6:31355182-31355202; chr6:31355348-31355368; chr6:31355180-31355200; chr6:31355145-31355165; chr6:31355349-31355369; chr6:31355157-31355177; chr6:31356381-31356401; chr6:31356380-31356400; chr6:31355204-31355224; chr6:31355205-31355225; chr6:31355185-31355205; chr6:31355191-31355211; chr6:31355192-31355212; chr6:31355190-31355210; chr6:31355193-31355213; chr6:31355198-31355218; chr6:31355320-31355340; chr6:31355319-31355339; chr6:31355178-31355198; chr6:31355347-31355367; chr6:31355432-31355452; chr6:31355340-31355360; chr6:31355576-31355596; chr6:31355410-31355430; chr6:31355419-31355439; and chr6:31355414-31355434; chr6:31355409-31355429; or
b) a gene editing system that binds to an HLA-B genomic target sequence comprising at least 5 or at least 10 contiguous nucleotides within the genomic coordinates chosen from: chr6:31355222-31355246: chr6:31355221-31355245: chr6:31355205-31355229; chr6:31355446-31355470: chr6:31356425-31356449: chr6:31355441-31355465; chr6:31356777-31356801: chr6:31355492-31355516: chr6: 31355379-31355403; chr6:31355491-31355515: chr6:31355361-31355385: chr6:31355356-31355380; chr6:31355460-31355484: chr6:31357078-31357102: chr6:31355417-31355441; chr6:31355366-31355390: chr6:31355415-31355439: chr6:31355378-31355402; chr6:31355166-31355190: chr6:31355401-31355425: ch6:31355469-31355493; chr6:31356262-31356286; chr6:31355419-31355443; chr6:31355390-31355414; chr6:31355369-31355393; chr6:31355203-31355227; chr6:31356437-31356461; chr6:31356426-31356450; chr6:31356763-31356787; chr6:31356764-31356788; chr6:31356762-31356786; chr6:31355204-31355228; chr6:31356436-31356460; and chr6:31356767-31356791.

20. (canceled)

21. The engineered human cell of claim 1, wherein HLA-A expression is reduced or eliminated by a gene editing system that binds to an HLA-A genomic target sequence comprising at least 5 or at least 10 contiguous nucleotides within the genomic coordinates chosen from: (a) chr6:29942891-29942915; chr6:29942609-29942633; chr6:29942864-29942884; chr6:29942868-29942888; chr6:29942876-29942896; chr6:29942877-29942897; chr6:29942883-29942903; chr6:29943126-29943146; chr6:29943528-29943548; chr6:29943529-29943549; chr6:29943530-29943550; chr6:29943537-29943557; chr6:29943549-29943569; chr6:29943589-29943609; chr6:29944026-29944046; chr6:29934330-29934350, chr6:29943115-29943135, chr6:29943135-29943155, chr6:29943140-29943160, chr6:29943590-29943610, chr6:29943824-29943844, chr6:29943858-29943878, chr6:29944478-29944498, and chr6:29944850-29944870; and (b) chr6:29942891-29942915 and chr6:29942609-29942633.

22. (canceled)

23. (canceled)

24. The engineered human cell of claim 1, wherein the cell is homozygous for HLA-C.

25. The engineered human cell of claim 1, wherein the HLA-C allele is selected from any one of the following HLA-C alleles: HLA-C*07:02; HLA-C*07:01; HLA-C*05:01; HLA-C*04:01 HLA-C*03:04; HLA-C*06:02; HLA-C*08:02; HLA-C*08:01; HLA-C*03:02; HLA-C*06:02; HLA-C*16:01; HLA-C*12:03; HLA-C*04:01; HLA-C*15:02; HLA-C*07:01; HLA-C*03:04; HLA-C*12:03; HLA-C*02:10; HLA-C*05:01; HLA-C*12:02; HLA-C*14:02; HLA-C*06:02; HLA-C*04:01; HLA-C*03:03; HLA-C*07:04; HLA-C*07:04; HLA-C*04:01; HLA-C*17:01; HLA-C*01:02; and HLA-C*02:02.

26. The engineered human cell of claim 1, wherein the engineered cell is homozygous for HLA-A, the HLA-A allele is selected from any one of the following HLA-A alleles: HLA-A*02:01; HLA-A*01:01; HLA-A*03:01; HLA-A*11:01; HLA-A*26:01; HLA-A*68:01; HLA-A*29:02; HLA-A*31:01; HLA-A*32:01; HLA-A*30:02; HLA-A*25:01; HLA-A*33:01; HLA-A*02:02; HLA-A*74:01; HLA-A*02:02; HLA-A*29:01; HLA-A*02:03; HLA-A*02:05; HLA-A*24:07; HLA-A*11:02; HLA-A*36:01; HLA-A*02:22; HLA-A*34:02; HLA-A*01:03; HLA-A*24:02; HLA-A*02:07; HLA-A*23:01; HLA-A*30:01; HLA-A*33:03; HLA-A*02:06; HLA-A*34:02; and HLA-A*68:02.

27. The engineered human cell of claim 1, wherein the engineered cell is homozygous for HLA-A and wherein the engineered cell is homozygous for HLA-C, wherein the HLA-A allele is selected from any one of the following HLA-A alleles: HLA-A*02:01; HLA-A*01:01; HLA-A*03:01; HLA-A*11:01; HLA-A*26:01; HLA-A*68:01; HLA-A*29:02; HLA-A*31:01; HLA-A*32:01; HLA-A*30:02; HLA-A*25:01; HLA-A*33:01; HLA-A*02:02; HLA-A*74:01; HLA-A*02:02; HLA-A*29:01; HLA-A*02:03; HLA-A*02:05; HLA-A*24:07; HLA-A*11:02; HLA-A*36:01; HLA-A*02:22; HLA-A*34:02; HLA-A*01:03; HLA-A*24:02; HLA-A*02:07; HLA-A*23:01; HLA-A*30:01; HLA-A*33:03; HLA-A*02:06; HLA-A*34:02; and HLA-A*68:02; and the HLA-C allele is selected from any one of the following HLA-C alleles: HLA-C*07:02; HLA-C*07:01; HLA-C*05:01; HLA-C*04:01 HLA-C*03:04; HLA-C*06:02; HLA-C*08:02; HLA-C*08:01; HLA-C*03:02; HLA-C*16:01; HLA-C*15:02; HLA-C*03:04; HLA-C*12:03; HLA-C*02:10; HLA-C*05:01; HLA-C*12:02; HLA-C*14:02; HLA-C*04:01; HLA-C*03:03; HLA-C*07:04; HLA-C*17:01; HLA-C*01:02; and HLA-C*02:02.

28. The engineered human cell of claim 1, wherein the cell has:
a) reduced or eliminated surface expression of MHC class II protein,
b) a genetic modification of a gene selected from CIITA, HLA-DR, HLA-DQ, HLA-DP, RFX5, RFXB/ANK, RFXAP, CREB, NF-YA, NF-YB, and NF-YC;
c) a genetic modification in the CIITA gene;
d) reduced or eliminated surface expression of TRAC protein; and/or
e) reduced or eliminated surface expression of TRBC protein.

29. (canceled)

30. (canceled)

31. (canceled)

32. (canceled)

33. The engineered human cell of claim 1, wherein the genetic modification comprises:
a) at least 2, at least 3, at least 4, at least 5, at least 6, at least 7, at least 8, at least 9, or at least 10 contiguous nucleotides within the genomic coordinates;
b) an indel; and/or
c) at least one C to T substitution or at least one A to G substitution within the genomic coordinates.

34. (canceled)

35. (canceled)

36. A pharmaceutical composition comprising the engineered human cell of claim 1.

37. A population of cells comprising the engineered human cell of claim 1.

38. A pharmaceutical composition comprising the population of cells of claim 37.

39. The population of claim 37, wherein
a) at least 65%, at least 70%, at least 80%, at least 90%, at least 91%, at least 92%, at least 93%, at least 94%, at least 95%, at least 96%, at least 97%, at least 98%, or at least 99% of the population of cells is HLA-A negative or HLA-B negative as measured by flow cytometry;
b) at least 65%, at least 70%, at least 80%, at least 85%, at least 90%, at least 95%, at least 96%, at least 97%, at least 98%, or at least 99% of the population of cells comprises the genetic modification in the HLA-A gene or the genetic modification in the HLA-B gene, as measured by next-generation sequencing (NGS);
c) at least 94%, at least 95%, at least 96%, at least 97%, at least 98%, or at least 99% of the population of cells is CIITA negative as measured by flow cytometry; and/or
d) at least 95%, at least 97%, at least 98%, at least 99%, or at least 99.5% of the population of cells is endogenous TCR protein negative as measured by flow cytometry.

40. (canceled)

41. (canceled)

42. (canceled)

43. (canceled)

44. (canceled)

45. A method of treating a disease or disorder comprising administering the engineered human cell of claim 1 to a subject in need thereof, optionally wherein the disease or disorder is a cancer, an infectious disease, or an autoimmune disease.

46. A composition, comprising:
a) an HLA-B guide RNA; or
b) an HLA-B guide RNA and an HLA-A guide RNA,
wherein the HLA-B guide RNA comprises:
i. a guide sequence selected from SEQ ID NOs: 165, 166, 177, 13, 74, 1-12, 14-73, 75-91, 101-164, 167-176, and 178-185;
ii. at least 17, 18, 19, or 20 contiguous nucleotides of a sequence selected from SEQ ID NOs: 1-91; or at least 17, 18, 19, 20, 21, 22, 23, or 24 contiguous nucleotides of a sequence selected from SEQ ID NOs: 101-185;
iii. a guide sequence at least 95%, 90%, or 85% identical to a sequence selected from SEQ ID NOs: 1-91; or a guide sequence at least 95%, 90%, 85%, 80%, 75%, or 70% identical to a sequence selected from SEQ ID NOs: 101-185;
iv. a guide sequence that binds a target site comprising a genomic region listed in Table 2 or 3; or
v. a guide sequence that is complementary to at least 17, 18, 19, or 20 contiguous nucleotides of a genomic region listed in Table 2 or a guide sequence that is complementary to at least 17, 18, 19, 20, 21, 22, 23, or 24 contiguous nucleotides of a genomic region listed in Table 3; and
wherein the HLA-A guide RNA, if present, comprises:
i. a guide sequence selected from SEQ ID NOs: 576, 571, 301-570, 572-575, and 577-590; or
ii. at least 17, 18, 19, or 20 contiguous nucleotides of a sequence selected from SEQ ID NOs: 301-428 and 463-511: or at least 17, 18, 19, 20, 21, 22, 23, or 24 contiguous nucleotides of a sequence selected from SEQ ID NOs: 429-462 and 512-590; or
iii. a guide sequence at least 95%, 90%, or 85% identical to a sequence selected from SEQ ID NOs: 301-428 and 463-511: or a guide sequence at least 95%, 90%, 85%, 80%, 75%, or 70% identical to a sequence selected from SEQ ID NOs: 512-590; or
iv. a guide sequence that binds a target site comprising a genomic region listed in Tables 4-7; or
v. a guide sequence that is complementary to at least 17, 18, 19, 20, 21, 22, 23, or 24 contiguous nucleotides of a genomic region listed in Tables 4-7.

47. (canceled)

48. A method of making an engineered human cell, wherein the engineered human cell has reduced or eliminated surface expression of:
I) HLA-B protein relative to an unmodified cell, the method comprising: contacting a cell with a composition comprising an HLA-B guide RNA; or
II) HLA-A and HLA-B protein relative to an unmodified cell, the method comprising: (a) contacting a cell with a first composition comprising an HLA-B guide RNA; and (b) contacting the cell with a second composition comprising an HLA-A guide RNA,
wherein the HLA-B guide RNA comprises:
i. a guide sequence selected from SEQ ID NOs: 165, 166, 177, 13, 74, 1-12, 14-73, 75-91, 101-164, 167-176, and 178-185;
ii. at least 17, 18, 19, or 20 contiguous nucleotides of a sequence selected from SEQ ID NOs: 1-91; or at least 17, 18, 19, 20, 21, 22, 23, or 24 contiguous nucleotides of a sequence selected from SEQ ID NOs: 101-185;
iii. a guide sequence at least 95%, 90%, or 85% identical to a sequence selected from SEQ ID NOs: 1-91; or a guide sequence at least 95%, 90%, 85%, 80%, 75%, or 70% identical to a sequence selected from SEQ ID NOs: 101-185;
iv. a guide sequence that binds a target site comprising a genomic region listed in Table 2 or 3; or
v. a guide sequence that is complementary to at least 17, 18, 19, or 20 contiguous nucleotides of a genomic region listed in Table 2 or a guide sequence that is complementary to at least 17, 18, 19, 20, 21, 22, 23, or 24 contiguous nucleotides of a genomic region listed in Table 3;
wherein the HLA-A guide RNA, if present, comprises:
i. a guide sequence selected from SEQ ID NOs: 576, 571, 301-570, 572-575, and 577-590; or
ii. at least 17, 18, 19, or 20 contiguous nucleotides of a sequence selected from SEQ ID NOs: 301-428 and 463-511: or at least 17, 18, 19, 20, 21, 22, 23, or 24 contiguous nucleotides of a sequence selected from SEQ ID NOs: 429-462 and 512-590; or
iii. a guide sequence at least 95%, 90%, or 85% identical to a sequence selected from SEQ ID NOs: 301-428 and 463-511: or a guide sequence at least 95%, 90%, 85%, 80%, 75%, or 70% identical to a sequence selected from SEQ ID NOs: 512-590; or
iv. a guide sequence that binds a target site comprising a genomic region listed in Tables 4-7; or
v. a guide sequence that is complementary to at least 17, 18, 19, 20, 21, 22, 23, or 24 contiguous nucleotides of a genomic region listed in Tables 4-7.

49. (canceled)

50. (canceled)

51. (canceled)

52. (canceled)

53. (canceled)

54. The engineered human cell of claim 1, further comprising an RNA-guided DNA-binding agent or nucleic acid encoding the RNA-guided DNA binding agent, wherein the RNA-guided DNA-binding agent is NmeCas9, and the HLA-B guide RNA comprises: (i) a guide sequence selected from SEQ ID NOs: 165, 166, 163, 164, 169, and 177; or (ii) a guide sequence that is at least 17, 18, 19, 20, 21, 22, 23, or 24 contiguous nucleotides of a sequence selected from SEQ ID NOs: 165, 166, 163, 164, and 177; or (iii) a guide sequence at least 95%, 90%, 85%, 80%, 75%, or 70% identical to a sequence selected from SEQ ID NOs: 165, 166, 163, 164, and 177.

55. (canceled)

56. (canceled)

57. (canceled)

58. (canceled)

59. (canceled)

60. (canceled)

61. (canceled)

62. (canceled)

63. (canceled)

64. (canceled)

65. (canceled)

66. The engineered human cell of claim 1, wherein the cell is an allogeneic cell and/or a stem cell.

67. (canceled)

68. The engineered human cell of claim 1, further comprising:
a) an exogenous nucleic acid encoding a polypeptide, wherein the polypeptide is an antibody or antibody fragment;
b) an exogenous nucleic acid encoding a polypeptide that is secreted by the cell, wherein the secreted polypeptide is an enzyme;
c) an exogenous nucleic acid encoding a polypeptide that is secreted by the cell, wherein the secreted polypeptide is a cytokine;
d) an exogenous nucleic acid encoding a targeting receptor, wherein the targeting receptor is a T cell receptor (TCR);
e) an exogenous nucleic acid encoding a targeting receptor, wherein the targeting receptor is a genetically modified TCR;
f) an exogenous nucleic acid encoding a targeting receptor, wherein the targeting receptor is a WT1 TCR;
g) an exogenous nucleic acid encoding a targeting receptor, wherein the targeting receptor is a CAR;
h) an exogenous nucleic acid encoding a targeting receptor, wherein the targeting receptor is a universal CAR; or
i) an exogenous nucleic acid encoding a targeting receptor, wherein the targeting receptor is an anti-CD30 CAR.

69. (canceled)

70. (canceled)

71. (canceled)

72. (canceled)

73. (canceled)

74. (canceled)

75. (canceled)

76. (canceled)

77. (canceled)

78. (canceled)

79. (canceled)

80. (canceled)

81. (canceled)

82. (canceled)

83. (canceled)

84. The engineered human cell of claim 68, wherein the exogenous nucleic acid is provided to the cell in a vector, optionally wherein the vector is a viral vector.

85. (canceled)

86. (canceled)

87. (canceled)

88. (canceled)

89. (canceled)

90. (canceled)

91. (canceled)

92. (canceled)

93. (canceled)

94. (canceled)

95. (canceled)

96. (canceled)

97. (canceled)

98. (canceled)

99. (canceled)

100. (canceled)

101. (canceled)

102. (canceled)

103. (canceled)

104. (canceled)

105. (canceled)

106. (canceled)

107. (canceled)

108. (canceled)

109. (canceled)

110. (canceled)

111. A cell bank comprising: (a) the engineered human cell of claim 1; and (b) a catalogue comprising information documenting the HLA-C alleles of the cell in the cell bank.

112. A method of administering an engineered human cell to a recipient subject in need thereof, the method comprising: (a) determining the HLA-C alleles of the recipient subject; (b) selecting the engineered human cell of claim 1, wherein the engineered human cell is homozygous for one of the HLA-C alleles of the recipient subject; and (c) administering the selected engineered human cell to the recipient subject.

The application's sequence listing, which the Patent Office published only in electronic form, follows.

SEQUENCE LISTING (3126 sequences)

SEQ ID NO: 1 - RNA, 20 nt, synthetic construct
  source 1..20: mol_type = other RNA
ccagcctggacgcaggcacc

SEQ ID NO: 2 - RNA, 20 nt, synthetic construct
  source 1..20: mol_type = other RNA
aggcgctttgcatctctcat

SEQ ID NO: 3 - RNA, 20 nt, synthetic construct
  source 1..20: mol_type = other RNA
aacaatgcccacgatgggga

SEQ ID NO: 4 - RNA, 20 nt, synthetic construct
  source 1..20: mol_type = other RNA
ccagacaccagcctggacgc

SEQ ID NO: 5 - RNA, 20 nt, synthetic construct
  source 1..20: mol_type = other RNA
ccatctcctataggtcgccg

SEQ ID NO: 6 - RNA, 20 nt, synthetic construct
  source 1..20: mol_type = other RNA
cttctctctaggacaattaa

SEQ ID NO: 7 - RNA, 20 nt, synthetic construct
  source 1..20: mol_type = other RNA
ccccatctcctataggtcgc

SEQ ID NO: 8 - RNA, 20 nt, synthetic construct
  source 1..20: mol_type = other RNA
ggatctcggacccggagact

SEQ ID NO: 9 - RNA, 20 nt, synthetic construct
  source 1..20: mol_type = other RNA
cttcctcccagtcccctcac

SEQ ID NO: 10 - RNA, 20 nt, synthetic construct
  source 1..20: mol_type = other RNA
ctcctgtcccacgtctcctg

SEQ ID NO: 11 - RNA, 20 nt, synthetic construct
  source 1..20: mol_type = other RNA
ccattttcctcctcttctcg

SEQ ID NO: 12 - RNA, 20 nt, synthetic construct
  source 1..20: mol_type = other RNA
ggttcccaaggctgctgcag

SEQ ID NO: 13 - RNA, 20 nt, synthetic construct
  source 1..20: mol_type = other RNA
acatgccatgtacagcatga

SEQ ID NO: 14 - RNA, 20 nt, synthetic construct
  source 1..20: mol_type = other RNA
cggttcccaaggctgctgca

SEQ ID NO: 15 - RNA, 20 nt, synthetic construct
  source 1..20: mol_type = other RNA
aacgcgcctggggctctcgc

SEQ ID NO: 16 - RNA, 20 nt, synthetic construct
  source 1..20: mol_type = other RNA
tggtgggggtgggagtgtgg

SEQ ID NO: 17 - RNA, 20 nt, synthetic construct
  source 1..20: mol_type = other RNA
gagtctctgagcggggaaca

SEQ ID NO: 18 - RNA, 20 nt, synthetic construct
  source 1..20: mol_type = other RNA
gggaggagcgaggggaccgc

SEQ ID NO: 19 - RNA, 20 nt, synthetic construct
  source 1..20: mol_type = other RNA
tgaggggactgggaggaagc

SEQ ID NO: 20 - RNA, 20 nt, synthetic construct
  source 1..20: mol_type = other RNA
ctgcgtccaggctggtgtct

SEQ ID NO: 21 - RNA, 20 nt, synthetic construct
  source 1..20: mol_type = other RNA
cctcgaccggcgagagcccc

SEQ ID NO: 22 - RNA, 20 nt, synthetic construct
  source 1..20: mol_type = other RNA
aacacgaggaaagcaagtgt

SEQ ID NO: 23 - RNA, 20 nt, synthetic construct
  source 1..20: mol_type = other RNA
actttacctccactcagatc

SEQ ID NO: 24 - RNA, 20 nt, synthetic construct
  source 1..20: mol_type = other RNA
tctgctcctgatctgagtgg

SEQ ID NO: 25 - RNA, 20 nt, synthetic construct
  source 1..20: mol_type = other RNA
atctcggacccggagactcg

SEQ ID NO: 26 - RNA, 20 nt, synthetic construct
  source 1..20: mol_type = other RNA
cctggggctctcgccggtcg

SEQ ID NO: 27 - RNA, 20 nt, synthetic construct
  source 1..20: mol_type = other RNA
ctggtcacatgggtggtcct

SEQ ID NO: 28 - RNA, 20 nt, synthetic construct
  source 1..20: mol_type = other RNA
ctcctataggtcgccgggga

SEQ ID NO: 29 - RNA, 20 nt, synthetic construct
  source 1..20: mol_type = other RNA
gtaaagtgactcagaagtgc

SEQ ID NO: 30 - RNA, 20 nt, synthetic construct
  source 1..20: mol_type = other RNA
acacaggggctaacgcagcc

SEQ ID NO: 31 - RNA, 20 nt, synthetic construct
  source 1..20: mol_type = other RNA
atacttctggaaattccttt

SEQ ID NO: 32 - RNA, 20 nt, synthetic construct
  source 1..20: mol_type = other RNA
gtcctagcagttgtggtcat

SEQ ID NO: 33 - RNA, 20 nt, synthetic construct
  source 1..20: mol_type = other RNA
cccatctcctataggtcgcc

SEQ ID NO: 34 - RNA, 20 nt, synthetic construct
  source 1..20: mol_type = other RNA
cgacctataggagatgggga

SEQ ID NO: 35 - RNA, 20 nt, synthetic construct
  source 1..20: mol_type = other RNA
gaagtatgactacagaccca

SEQ ID NO: 36 - RNA, 20 nt, synthetic construct
  source 1..20: mol_type = other RNA
ctccgatgaccacaactgct

SEQ ID NO: 37 - RNA, 20 nt, synthetic construct
  source 1..20: mol_type = other RNA
agttgtggtcatcggagctg

SEQ ID NO: 38 - RNA, 20 nt, synthetic construct
  source 1..20: mol_type = other RNA
tacttctggaaattcctttt

SEQ ID NO: 39 - RNA, 20 nt, synthetic construct
  source 1..20: mol_type = other RNA
cacatgccatgtacagcatg

SEQ ID NO: 40 - RNA, 20 nt, synthetic construct
  source 1..20: mol_type = other RNA
ggagcgaggggaccgcaggc

SEQ ID NO: 41 - RNA, 20 nt, synthetic construct
  source 1..20: mol_type = other RNA
aggaaaagtcacggttccca

SEQ ID NO: 42 - RNA, 20 nt, synthetic construct
  source 1..20: mol_type = other RNA
gagccttccccatctcctat

SEQ ID NO: 43 - RNA, 20 nt, synthetic construct
  source 1..20: mol_type = other RNA
gactccccatcccccacgta

SEQ ID NO: 44 - RNA, 20 nt, synthetic construct
  source 1..20: mol_type = other RNA
cccggcgacctataggagat

SEQ ID NO: 45 - RNA, 20 nt, synthetic construct
  source 1..20: mol_type = other RNA
acggttcccaaggctgctgc

SEQ ID NO: 46 - RNA, 20 nt, synthetic construct
  source 1..20: mol_type = other RNA
gggagtcgtgacctgcgccc

SEQ ID NO: 47 - RNA, 20 nt, synthetic construct
  source 1..20: mol_type = other RNA
gagcgaggggaccgcaggcg

SEQ ID NO: 48 - RNA, 20 nt, synthetic construct
  source 1..20: mol_type = other RNA
cctggctgtcctagcagttg

SEQ ID NO: 49 - RNA, 20 nt, synthetic construct
  source 1..20: mol_type = other RNA
acatgccatgtacagcatga

SEQ ID NO: 50 - RNA, 20 nt, synthetic construct
  source 1..20: mol_type = other RNA
aacaatgcccacgatgggga

SEQ ID NO: 51 - RNA, 20 nt, synthetic construct
  source 1..20: mol_type = other RNA
ctccgatgaccacaactgct

SEQ ID NO: 52 - RNA, 20 nt, synthetic construct
  source 1..20: mol_type = other RNA
cacatgccatgtacagcatg

SEQ ID NO: 53 - RNA, 20 nt, synthetic construct
  source 1..20: mol_type = other RNA
ccggacgggcgcctcctccg

SEQ ID NO: 54 - RNA, 20 nt, synthetic construct
  source 1..20: mol_type = other RNA
cggacgggcgcctcctccgc

SEQ ID NO: 55 - RNA, 20 nt, synthetic construct
  source 1..20: mol_type = other RNA
gagccgtcttcccagtccac

SEQ ID NO: 56 - RNA, 20 nt, synthetic construct
  source 1..20: mol_type = other RNA
agagccgtcttcccagtcca

SEQ ID NO: 57 - RNA, 20 nt, synthetic construct
  source 1..20: mol_type = other RNA
gtacggctgcgacgtggggc

SEQ ID NO: 58 - RNA, 20 nt, synthetic construct
  source 1..20: mol_type = other RNA
ccgtccccatcgtgggcatt

SEQ ID NO: 59 - RNA, 20 nt, synthetic construct
  source 1..20: mol_type = other RNA
tcgctgctgtgatgtgtagg

SEQ ID NO: 60 - RNA, 20 nt, synthetic construct
  source 1..20: mol_type = other RNA
tggtcgctgctgtgatgtgt

SEQ ID NO: 61 - RNA, 20 nt, synthetic construct
  source 1..20: mol_type = other RNA
ccaggcagcgacagtgccca

SEQ ID NO: 62 - RNA, 20 nt, synthetic construct
  source 1..20: mol_type = other RNA
ggcagcgacagtgcccaggg

SEQ ID NO: 63 - RNA, 20 nt, synthetic construct
  source 1..20: mol_type = other RNA
tccaggcagcgacagtgccc

SEQ ID NO: 64 - RNA, 20 nt, synthetic construct
  source 1..20: mol_type = other RNA
agtccaccgtccccatcgtg

SEQ ID NO: 65 - RNA, 20 nt, synthetic construct
  source 1..20: mol_type = other RNA
cagtccaccgtccccatcgt

SEQ ID NO: 66 - RNA, 20 nt, synthetic construct
  source 1..20: mol_type = other RNA
gtccaccgtccccatcgtgg

SEQ ID NO: 67 - RNA, 20 nt, synthetic construct
  source 1..20: mol_type = other RNA
ccagtccaccgtccccatcg

SEQ ID NO: 68 - RNA, 20 nt, synthetic construct
  source 1..20: mol_type = other RNA
tcttcccagtccaccgtccc

SEQ ID NO: 69 - RNA, 20 nt, synthetic construct
  source 1..20: mol_type = other RNA
cgaagcccctcaccctgaga

SEQ ID NO: 70 - RNA, 20 nt, synthetic construct
  source 1..20: mol_type = other RNA
gaagcccctcaccctgagat

SEQ ID NO: 71 - RNA, 20 nt, synthetic construct
  source 1..20: mol_type = other RNA
tccccatcgtgggcattgtt

SEQ ID NO: 72 - RNA, 20 nt, synthetic construct
  source 1..20: mol_type = other RNA
agttgtggtcatcggagctg

SEQ ID NO: 73 - RNA, 20 nt, synthetic construct
  source 1..20: mol_type = other RNA
catcgtgggcattgttgctg

SEQ ID NO: 74 - RNA, 20 nt, synthetic construct
  source 1..20: mol_type = other RNA
catgccatgtacagcatgag

SEQ ID NO: 75 - RNA, 20 nt, synthetic construct
  source 1..20: mol_type = other RNA
ggctgtcctagcagttgtgg

SEQ ID NO: 76 - RNA, 20 nt, synthetic construct
  source 1..20: mol_type = other RNA
atcgtgggcattgttgctgg

SEQ ID NO: 77 - RNA, 20 nt, synthetic construct
  source 1..20: mol_type = other RNA
cccatcgtgggcattgttgc

SEQ ID NO: 78 - RNA, 20 nt, synthetic construct
  source 1..20: mol_type = other RNA
cctggctgtcctagcagttg

SEQ ID NO: 79 - RNA, 20 nt, synthetic construct
  source 1..20: mol_type = other RNA
cgtgggcattgttgctggcc

SEQ ID NO: 80 - RNA, 20 nt, synthetic construct
  source 1..20: mol_type = other RNA
agcagttgtggtcatcggag

SEQ ID NO: 81 - RNA, 20 nt, synthetic construct
  source 1..20: mol_type = other RNA
cttgtggagaccagaccagc

SEQ ID NO: 82 - RNA, 20 nt, synthetic construct
  source 1..20: mol_type = other RNA
tgtacagcatgaggggctgc

SEQ ID NO: 83 - RNA, 20 nt, synthetic construct
  source 1..20: mol_type = other RNA
tcgtgggcattgttgctggc

SEQ ID NO: 84 - RNA, 20 nt, synthetic construct
  source 1..20: mol_type = other RNA
gtcctagcagttgtggtcat

SEQ ID NO: 85 - RNA, 20 nt, synthetic construct
  source 1..20: mol_type = other RNA
gtgtctctcacagcttgaaa

SEQ ID NO: 86 - RNA, 20 nt, synthetic construct
  source 1..20: mol_type = other RNA
tcagaccccccaaagacaca

SEQ ID NO: 87 - RNA, 20 nt, synthetic construct
  source 1..20: mol_type = other RNA
ctcctcagacgccgagatgc

SEQ ID NO: 88 - RNA, 20 nt, synthetic construct
  source 1..20: mol_type = other RNA
gagatagaaccttccagaag

SEQ ID NO: 89 - RNA, 20 nt, synthetic construct
  source 1..20: mol_type = other RNA
gaccagcaggagatagaacc

SEQ ID NO: 90 - RNA, 20 nt, synthetic construct
  source 1..20: mol_type = other RNA
gcaggagatagaaccttcca

SEQ ID NO: 91 - RNA, 20 nt, synthetic construct
  source 1..20: mol_type = other RNA
agatagaaccttccagaagt

SEQ ID NO: 92-100 - skipped (9 entries)

SEQ ID NO: 101 - RNA, 24 nt, synthetic construct
  source 1..24: mol_type = other RNA
cttctggagaagagcagagataca

SEQ ID NO: 102 - RNA, 24 nt, synthetic construct
  source 1..24: mol_type = other RNA
cacatgccatgtacagcatgaggg

SEQ ID NO: 103 - RNA, 24 nt, synthetic construct
  source 1..24: mol_type = other RNA
cactgacctggcagcgggatggcg

SEQ ID NO: 104 - RNA, 24 nt, synthetic construct
  source 1..24: mol_type = other RNA
ccatgtacagcatgaggggctgcc

SEQ ID NO: 105 - RNA, 24 nt, synthetic construct
  source 1..24: mol_type = other RNA
cttacacgcagcctgagagtagct

SEQ ID NO: 106 - RNA, 24 nt, synthetic construct
  source 1..24: mol_type = other RNA
agctgcccacttctggaaggttct

SEQ ID NO: 107 - RNA, 24 nt, synthetic construct
  source 1..24: mol_type = other RNA
cttccagaagtgggcagctgtggt

SEQ ID NO: 108 - RNA, 24 nt, synthetic construct
  source 1..24: mol_type = other RNA
ccatctcagggtgaggggcttcgg

SEQ ID NO: 109 - RNA, 24 nt, synthetic construct
  source 1..24: mol_type = other RNA
catctcagggtgaggggcttcggc

SEQ ID NO: 110 - RNA, 24 nt, synthetic construct
  source 1..24: mol_type = other RNA
cagcatgaggggctgccgaagccc

SEQ ID NO: 111 - RNA, 24 nt, synthetic construct
  source 1..24: mol_type = other RNA
cccatctcagggtgaggggcttcg

SEQ ID NO: 112 - RNA, 24 nt, synthetic construct
  source 1..24: mol_type = other RNA
atgtacagcatgaggggctgccga

SEQ ID NO: 113 - RNA, 24 nt, synthetic construct
  source 1..24: mol_type = other RNA
catgtacagcatgaggggctgccg

SEQ ID NO: 114 - RNA, 24 nt, synthetic construct
  source 1..24: mol_type = other RNA
agatcacccagcgcaagtgggagg

SEQ ID NO: 115 - RNA, 24 nt, synthetic construct
  source 1..24: mol_type = other RNA
cagatcacccagcgcaagtgggag

SEQ ID NO: 116 - RNA, 24 nt, synthetic construct
  source 1..24: mol_type = other RNA
gcctcccacttgcgctgggtgatc

SEQ ID NO: 117 - RNA, 24 nt, synthetic construct
  source 1..24: mol_type = other RNA
cccaatactccggcccctcctgct

SEQ ID NO: 118 - RNA, 24 nt, synthetic construct
  source 1..24: mol_type = other RNA
cactcaccggcccaggtctcggtc

SEQ ID NO: 119 - RNA, 24 nt, synthetic construct
  source 1..24: mol_type = other RNA
tagagcaggaggggccggagtatt

SEQ ID NO: 120 - RNA, 24 nt, synthetic construct
  source 1..24: mol_type = other RNA
ccggcccaggtctcggtcagggcc

SEQ ID NO: 121 - RNA, 24 nt, synthetic construct
  source 1..24: mol_type = other RNA
accacttacacgcagcctgagagt

SEQ ID NO: 122 - RNA, 24 nt, synthetic construct
  source 1..24: mol_type = other RNA
ccacttacacgcagcctgagagta

SEQ ID NO: 123 - RNA, 24 nt, synthetic construct
  source 1..24: mol_type = other RNA
tatctgcggagccactccacgcac

SEQ ID NO: 124 - RNA, 24 nt, synthetic construct
  source 1..24: mol_type = other RNA
agcctgagagtagctccctccttt

SEQ ID NO: 125 - RNA, 24 nt, synthetic construct
  source 1..24: mol_type = other RNA
cctgagtttggtcctcgccatccc

SEQ ID NO: 126 - RNA, 24 nt, synthetic construct
  source 1..24: mol_type = other RNA
gtgtatctctgctcttctccagaa

SEQ ID NO: 127 - RNA, 24 nt, synthetic construct
  source 1..24: mol_type = other RNA
cttctccagaaggcaccaccacag

SEQ ID NO: 128 - RNA, 24 nt, synthetic construct
  source 1..24: mol_type = other RNA
tacatggcatgtgtatctctgctc

SEQ ID NO: 129 - RNA, 24 nt, synthetic construct
  source 1..24: mol_type = other RNA
tatctctgctcttctccagaaggc

SEQ ID NO: 130 - RNA, 24 nt, synthetic construct
  source 1..24: mol_type = other RNA
tgctaggacagccaggccagcaac

SEQ ID NO: 131 - RNA, 24 nt, synthetic construct
  source 1..24: mol_type = other RNA
gctaggacagccaggccagcaaca

SEQ ID NO: 132 - RNA, 24 nt, synthetic construct
  source 1..24: mol_type = other RNA
gctccgatgaccacaactgctagg

SEQ ID NO: 133 - RNA, 24 nt, synthetic construct
  source 1..24: mol_type = other RNA
tcgtgggcattgttgctggcctgg

SEQ ID NO: 134 - RNA, 24 nt, synthetic construct
  source 1..24: mol_type = other RNA
gatgaccacaactgctaggacagc

SEQ ID NO: 135 - RNA, 24 nt, synthetic construct
  source 1..24: mol_type = other RNA
gtcctcgttcagggcgatgtaatc

SEQ ID NO: 136 - RNA, 24 nt, synthetic construct
  source 1..24: mol_type = other RNA
cgcagcctgagagtagctccctcc

SEQ ID NO: 137 - RNA, 24 nt, synthetic construct
  source 1..24: mol_type = other RNA
ggtcagtgtgatctccgcagggta

SEQ ID NO: 138 - RNA, 24 nt, synthetic construct
  source 1..24: mol_type = other RNA
gtcagtgtgatctccgcagggtag

SEQ ID NO: 139 - RNA, 24 nt, synthetic construct
  source 1..24: mol_type = other RNA
tacatcgccctgaacgaggacctg

SEQ ID NO: 140 - RNA, 24 nt, synthetic construct
  source 1..24: mol_type = other RNA
ggctcccactccatgaggtatttc

SEQ ID NO: 141 - RNA, 24 nt, synthetic construct
  source 1..24: mol_type = other RNA
tcttctccagaaggcaccaccaca

SEQ ID NO: 142 - RNA, 24 nt, synthetic construct
  source 1..24: mol_type = other RNA
agcatgaggggctgccgaagcccc

SEQ ID NO: 143 - RNA, 24 nt, synthetic construct
  source 1..24: mol_type = other RNA
agaccagaccagcaggagatagaa

SEQ ID NO: 144 - RNA, 24 nt, synthetic construct
  source 1..24: mol_type = other RNA
aaggttctatctcctgctggtctg

SEQ ID NO: 145 - RNA, 24 nt, synthetic construct
  source 1..24: mol_type = other RNA
gtggagaccagaccagcaggagat

SEQ ID NO: 146 - RNA, 24 nt, synthetic construct
  source 1..24: mol_type = other RNA
gcaaggattacatcgccctgaacg

SEQ ID NO: 147 - RNA, 24 nt, synthetic construct
  source 1..24: mol_type = other RNA
accatgaggccaccctgaggtgct

SEQ ID NO: 148 - RNA, 24 nt, synthetic construct
  source 1..24: mol_type = other RNA
gaccatgaggccaccctgaggtgc

SEQ ID NO: 149 - RNA, 24 nt, synthetic construct
  source 1..24: mol_type = other RNA
accaccccatctctgaccatgagg

SEQ ID NO: 150 - RNA, 24 nt, synthetic construct
  source 1..24: mol_type = other RNA
caccaccccatctctgaccatgag

SEQ ID NO: 151 - RNA, 24 nt, synthetic construct
  source 1..24: mol_type = other RNA
atgcccgcggaggaggcgcccgtc

SEQ ID NO: 152 - RNA, 24 nt, synthetic construct
  source 1..24: mol_type = other RNA
gaggcgcccgtccggccccacgtc

SEQ ID NO: 153 - RNA, 24 nt, synthetic construct
  source 1..24: mol_type = other RNA
gctgcgacgtggggccggacgggc

SEQ ID NO: 154 - RNA, 24 nt, synthetic construct
  source 1..24: mol_type = other RNA
gcgacgtggggccggacgggcgcc

SEQ ID NO: 155 - RNA, 24 nt, synthetic construct
  source 1..24: mol_type = other RNA
cgtgaggttcgacagcgacgccgc

SEQ ID NO: 156 - RNA, 24 nt, synthetic construct
  source 1..24: mol_type = other RNA
tccttttccacctgtgggaagaaa

SEQ ID NO: 157 - RNA, 24 nt, synthetic construct
  source 1..24: mol_type = other RNA
cagagcgaggccggtgagtgaccc

SEQ ID NO: 158 - RNA, 24 nt, synthetic construct
  source 1..24: mol_type = other RNA
ggtgtagaaatacctcatggagtg

SEQ ID NO: 159 - RNA, 24 nt, synthetic construct
  source 1..24: mol_type = other RNA
agaccctggccccggccccgcggt

SEQ ID NO: 160 - RNA, 24 nt, synthetic construct
  source 1..24: mol_type = other RNA
gagaccctggccccggccccgcgg

SEQ ID NO: 161 - RNA, 24 nt, synthetic construct
  source 1..24: mol_type = other RNA
ctcaccggcctcgctctggttgta

SEQ ID NO: 162 - RNA, 24 nt, synthetic construct
  source 1..24: mol_type = other RNA
ctgcgcggctactacaaccagagc

SEQ ID NO: 163 - RNA, 24 nt, synthetic construct
  source 1..24: mol_type = other RNA
caaactcaggacactgagcttgtg

SEQ ID NO: 164 - RNA, 24 nt, synthetic construct
  source 1..24: mol_type = other RNA
tcaggacactgagcttgtggagac

SEQ ID NO: 165 - RNA, 24 nt, synthetic construct
  source 1..24: mol_type = other RNA
tctgggaaaggaggggaagatgag

SEQ ID NO: 166 - RNA, 24 nt, synthetic construct
  source 1..24: mol_type = other RNA
ctctgggaaaggaggggaagatga

SEQ ID NO: 167 - RNA, 24 nt, synthetic construct
  source 1..24: mol_type = other RNA
acccagttcgtgaggttcgacagc

SEQ ID NO: 168 - RNA, 24 nt, synthetic construct
  source 1..24: mol_type = other RNA
cgctgcctggagtagaacaaaaac

SEQ ID NO: 169 - RNA, 24 nt, synthetic construct
  source 1..24: mol_type = other RNA
ctggagggtgtgagaccctggccc

SEQ ID NO: 170 - RNA, 24 nt, synthetic construct
  source 1..24: mol_type = other RNA
gcccaggtctcggtcagggccagg

SEQ ID NO: 171 - RNA, 24 nt, synthetic construct
  source 1..24: mol_type = other RNA
ctgtgtgttccggtcccaatactc

SEQ ID NO: 172 - RNA, 24 nt, synthetic construct
  source 1..24: mol_type = other RNA
tctgtgtgttccggtcccaatact

SEQ ID NO: 173 - RNA, 24 nt, synthetic construct
  source 1..24: mol_type = other RNA
tgtgtgttccggtcccaatactcc

SEQ ID NO: 174 - RNA, 24 nt, synthetic construct
  source 1..24: mol_type = other RNA
cgaaccgtcctcctgctgctctcg

SEQ ID NO: 175 - RNA, 24 nt, synthetic construct
  source 1..24: mol_type = other RNA
tctggagggtgtgagaccctggcc

SEQ ID NO: 176 - RNA, 24 nt, synthetic construct
  source 1..24: mol_type = other RNA
cccagagccgtcttcccagtccac

SEQ ID NO: 177 - RNA, 24 nt, synthetic construct
  source 1..24: mol_type = other RNA
tcccagagccgtcttcccagtcca

SEQ ID NO: 178 - RNA, 24 nt, synthetic construct
  source 1..24: mol_type = other RNA
ccagagccgtcttcccagtccacc

SEQ ID NO: 179 - RNA, 24 nt, synthetic construct
  source 1..24: mol_type = other RNA
gtgttccggtcccaatactccggc

SEQ ID NO: 180 - RNA, 24 nt, synthetic construct
  source 1..24: mol_type = other RNA
tggagggtgtgagaccctggcccc

SEQ ID NO: 181 - RNA, 24 nt, synthetic construct
  source 1..24: mol_type = other RNA
ccggcccctcctgctctatccacg

SEQ ID NO: 182 - RNA, 24 nt, synthetic construct
  source 1..24: mol_type = other RNA
tcccacttgcgctgggtgatctga

SEQ ID NO: 183 - RNA, 24 nt, synthetic construct
  source 1..24: mol_type = other RNA
cacagactgaccgagagagcctgc

SEQ ID NO: 184 - RNA, 24 nt, synthetic construct
  source 1..24: mol_type = other RNA
tgctggtcatggcgccccgaaccg

SEQ ID NO: 185 - RNA, 24 nt, synthetic construct
  source 1..24: mol_type = other RNA
cacatcagagccctgggcactgtc

SEQ ID NO: 186-300 - skipped (115 entries)

SEQ ID NO: 301 - RNA, 20 nt, synthetic construct
  source 1..20: mol_type = other RNA
tggagggcctgatgtgtgtt

SEQ ID NO: 302 - RNA, 20 nt, synthetic construct
  source 1..20: mol_type = other RNA
gcctgatgtgtgttgggtgt

SEQ ID NO: 303 - RNA, 20 nt, synthetic construct
  source 1..20: mol_type = other RNA
cctgatgtgtgttgggtgtt

SEQ ID NO: 304 - RNA, 20 nt, synthetic construct
  source 1..20: mol_type = other RNA
cccaacacccaacacacatc

SEQ ID NO: 305 - RNA, 20 nt, synthetic construct
  source 1..20: mol_type = other RNA
tcaggaaacatgaagaaagc

SEQ ID NO: 306 - RNA, 20 nt, synthetic construct
  source 1..20: mol_type = other RNA
aggcgcctgggcctctcccg

SEQ ID NO: 307 - RNA, 20 nt, synthetic construct
  source 1..20: mol_type = other RNA
cgggctggcctcccacaagg

SEQ ID NO: 308 - RNA, 20 nt, synthetic construct
  source 1..20: mol_type = other RNA
acggccatcctcggcgtctg

SEQ ID NO: 309 - RNA, 20 nt, synthetic construct
  source 1..20: mol_type = other RNA
gacggccatcctcggcgtct

SEQ ID NO: 310 - RNA, 20 nt, synthetic construct
  source 1..20: mol_type = other RNA
gacgccgaggatggccgtca

SEQ ID NO: 311 - RNA, 20 nt, synthetic construct
  source 1..20: mol_type = other RNA
tgacggccatcctcggcgtc

SEQ ID NO: 312 - RNA, 20 nt, synthetic construct
  source 1..20: mol_type = other RNA
ggcgccatgacggccatcct

SEQ ID NO: 313 - RNA, 20 nt, synthetic construct
  source 1..20: mol_type = other RNA
acagcgacgccgcgagccag

SEQ ID NO: 314 - RNA, 20 nt, synthetic construct
  source 1..20: mol_type = other RNA
cgacgccgcgagccagagga

SEQ ID NO: 315 - RNA, 20 nt, synthetic construct
  source 1..20: mol_type = other RNA
cgagccagaggatggagccg

SEQ ID NO: 316 - RNA, 20 nt, synthetic construct
  source 1..20: mol_type = other RNA
cggctccatcctctggctcg

SEQ ID NO: 317 - RNA, 20 nt, synthetic construct
  source 1..20: mol_type = other RNA
gagccagaggatggagccgc

SEQ ID NO: 318 - RNA, 20 nt, synthetic construct
  source 1..20: mol_type = other RNA
gcgcccgcggctccatcctc

SEQ ID NO: 319 - RNA, 20 nt, synthetic construct
  source 1..20: mol_type = other RNA
gcccgtccgtgggggatgag

SEQ ID NO: 320 - RNA, 20 nt, synthetic construct
  source 1..20: mol_type = other RNA
tcatcccccacggacgggcc

SEQ ID NO: 321 - RNA, 20 nt, synthetic construct
  source 1..20: mol_type = other RNA
atctcggacccggagactgt

SEQ ID NO: 322 - RNA, 20 nt, synthetic construct
  source 1..20: mol_type = other RNA
ggggtcccgcggcttcgggg

SEQ ID NO: 323 - RNA, 20 nt, synthetic construct
  source 1..20: mol_type = other RNA
ctcggggtcccgcggcttcg

SEQ ID NO: 324 - RNA, 20 nt, synthetic construct
  source 1..20: mol_type = other RNA
tctcggggtcccgcggcttc

SEQ ID NO: 325 - RNA, 20 nt, synthetic construct
  source 1..20: mol_type = other RNA
gtctcggggtcccgcggctt

SEQ ID NO: 326 - RNA, 20 nt, synthetic construct
  source 1..20: mol_type = other RNA
gcaagggtctcggggtcccg

SEQ ID NO: 327 - RNA, 20 nt, synthetic construct
  source 1..20: mol_type = other RNA
ggaccccgagacccttgccc

SEQ ID NO: 328 - RNA, 20 nt, synthetic construct
  source 1..20: mol_type = other RNA
gaccccgagacccttgcccc

SEQ ID NO: 329 - RNA, 20 nt, synthetic construct
  source 1..20: mol_type = other RNA
cgagacccttgccccgggag

SEQ ID NO: 330 - RNA, 20 nt, synthetic construct
  source 1..20: mol_type = other RNA
ctcccggggcaagggtctcg

SEQ ID NO: 331 - RNA, 20 nt, synthetic construct
  source 1..20: mol_type = other RNA
tctcccggggcaagggtctc

SEQ ID NO: 332 - RNA, 20 nt, synthetic construct
  source 1..20: mol_type = other RNA
ctctcccggggcaagggtct

SEQ ID NO: 333 - RNA, 20 nt, synthetic construct
  source 1..20: mol_type = other RNA
ccttgccccgggagaggccc

SEQ ID NO: 334 - RNA, 20 nt, synthetic construct
  source 1..20: mol_type = other RNA
ctgggcctctcccggggcaa

SEQ ID NO: 335 - RNA, 20 nt, synthetic construct
  source 1..20: mol_type = other RNA
cctgggcctctcccggggca

SEQ ID NO: 336 - RNA, 20 nt, synthetic construct
  source 1..20: mol_type = other RNA
tttaggccaaaaatcccccc

SEQ ID NO: 337 - RNA, 20 nt, synthetic construct
  source 1..20: mol_type = other RNA
cgctgcagcgcacgggtacc

SEQ ID NO: 338 - RNA, 20 nt, synthetic construct
  source 1..20: mol_type = other RNA
gctgcagcgcacgggtacca

SEQ ID NO: 339 - RNA, 20 nt, synthetic construct
  source 1..20: mol_type = other RNA
ctgcagcgcacgggtaccag

SEQ ID NO: 340 - RNA, 20 nt, synthetic construct
  source 1..20: mol_type = other RNA
cgcacgggtaccaggggcca

SEQ ID NO: 341 - RNA, 20 nt, synthetic construct
  source 1..20: mol_type = other RNA
gcacgggtaccaggggccac

SEQ ID NO: 342 - RNA, 20 nt, synthetic construct
  source 1..20: mol_type = other RNA
cacgggtaccaggggccacg

SEQ ID NO: 343 - RNA, 20 nt, synthetic construct
  source 1..20: mol_type = other RNA
gggaggcgccccgtggcccc

SEQ ID NO: 344 - RNA, 20 nt, synthetic construct
  source 1..20: mol_type = other RNA
gcgatcagggaggcgccccg

SEQ ID NO: 345 - RNA, 20 nt, synthetic construct
  source 1..20: mol_type = other RNA
tccttgtgggaggccagccc

SEQ ID NO: 346 - RNA, 20 nt, synthetic construct
  source 1..20: mol_type = other RNA
ctccttgtgggaggccagcc

SEQ ID NO: 347 - RNA, 20 nt, synthetic construct
  source 1..20: mol_type = other RNA
ggctggcctcccacaaggag

SEQ ID NO: 348 - RNA, 20 nt, synthetic construct
  source 1..20: mol_type = other RNA
ttgtctcccctccttgtggg

SEQ ID NO: 349 - RNA, 20 nt, synthetic construct
  source 1..20: mol_type = other RNA
ccacaaggaggggagacaat

SEQ ID NO: 350 - RNA, 20 nt, synthetic construct
  source 1..20: mol_type = other RNA
cacaaggaggggagacaatt

SEQ ID NO: 351 - RNA, 20 nt, synthetic construct
  source 1..20: mol_type = other RNA
caattgtctcccctccttgt

SEQ ID NO: 352 - RNA, 20 nt, synthetic construct
  source 1..20: mol_type = other RNA
ccaattgtctcccctccttg

SEQ ID NO: 353 - RNA, 20 nt, synthetic construct
  source 1..20: mol_type = other RNA
atccctcgaatactgatgag

SEQ ID NO: 354 - RNA, 20 nt, synthetic construct
  source 1..20: mol_type = other RNA
aaccactcatcagtattcga

SEQ ID NO: 355 - RNA, 20 nt, synthetic construct
  source 1..20: mol_type = other RNA
gaaccactcatcagtattcg

SEQ ID NO: 356 - RNA, 20 nt, synthetic construct
  source 1..20: mol_type = other RNA
gaggaaaagtcacgggccca

SEQ ID NO: 357 - RNA, 20 nt, synthetic construct
  source 1..20: mol_type = other RNA
ggcccgtgacttttcctctc

SEQ ID NO: 358 - RNA, 20 nt, synthetic construct
  source 1..20: mol_type = other RNA
tgcttcacactcaatgtgtg

SEQ ID NO: 359 - RNA, 20 nt, synthetic construct
  source 1..20: mol_type = other RNA
gcttcacactcaatgtgtgt

SEQ ID NO: 360 - RNA, 20 nt, synthetic construct
  source 1..20: mol_type = other RNA
cttcacactcaatgtgtgtg

SEQ ID NO: 361 - RNA, 20 nt, synthetic construct
  source 1..20: mol_type = other RNA
ttcacactcaatgtgtgtgg

SEQ ID NO: 362 - RNA, 20 nt, synthetic construct
  source 1..20: mol_type = other RNA
ttgagaatggacaggacacc

SEQ ID NO: 363 - RNA, 20 nt, synthetic construct
  source 1..20: mol_type = other RNA
aggcattttgcatctgtcat

SEQ ID NO: 364 - RNA, 20 nt, synthetic construct
  source 1..20: mol_type = other RNA
caggcattttgcatctgtca

SEQ ID NO: 365 - RNA, 20 nt, synthetic construct
  source 1..20: mol_type = other RNA
aggggccctgaccctgctaa

SEQ ID NO: 366 - RNA, 20 nt, synthetic construct
  source 1..20: mol_type = other RNA
tgggaaaagaggggaaggtg

SEQ ID NO: 367 - RNA, 20 nt, synthetic construct
  source 1..20: mol_type = other RNA
tggaggaggaagagctcagg

SEQ ID NO: 368 - RNA, 20 nt, synthetic construct
  source 1..20: mol_type = other RNA
tgagatttcttgtctcactg

SEQ ID NO: 369 - RNA, 20 nt, synthetic construct
  source 1..20: mol_type = other RNA
gagatttcttgtctcactga

SEQ ID NO: 370 - RNA, 20 nt, synthetic construct
  source 1..20: mol_type = other RNA
taaagcacctgttaaaatga

SEQ ID NO: 371 - RNA, 20 nt, synthetic construct
  source 1..20: mol_type = other RNA
aatctgtccttcattttaac

SEQ ID NO: 372 - RNA, 20 nt, synthetic construct
  source 1..20: mol_type = other RNA
gtcacaggggaaggtccctg

SEQ ID NO: 373 - RNA, 20 nt, synthetic construct
  source 1..20: mol_type = other RNA
aaacatgaagaaagcaggtg

SEQ ID NO: 374 - RNA, 20 nt, synthetic construct
  source 1..20: mol_type = other RNA
tgtcctgtgagataccagaa

SEQ ID NO: 375 - RNA, 20 nt, synthetic construct
  source 1..20: mol_type = other RNA
atgaaggaggctgatgcctg

SEQ ID NO: 376 - RNA, 20 nt, synthetic construct
  source 1..20: mol_type = other RNA
aggctgatgcctgaggtcct

SEQ ID NO: 377 - RNA, 20 nt, synthetic construct
  source 1..20: mol_type = other RNA
ggctgatgcctgaggtcctt

SEQ ID NO: 378 - RNA, 20 nt, synthetic construct
  source 1..20: mol_type = other RNA
cacaatatcccaaggacctc

SEQ ID NO: 379 - RNA, 20 nt, synthetic construct
  source 1..20: mol_type = other RNA
ggtccttgggatattgtgtt

SEQ ID NO: 380 - RNA, 20 nt, synthetic construct
  source 1..20: mol_type = other RNA
gtccttgggatattgtgttt

SEQ ID NO: 381 - RNA, 20 nt, synthetic construct
  source 1..20: mol_type = other RNA
ctcccaaacacaatatccca

SEQ ID NO: 382 - RNA, 20 nt, synthetic construct
  source 1..20: mol_type = other RNA
tcctctagccacatcttctg

SEQ ID NO: 383 - RNA, 20 nt, synthetic construct
  source 1..20: mol_type = other RNA
acagaagatgtggctagagg

SEQ ID NO: 384 - RNA, 20 nt, synthetic construct
  source 1..20: mol_type = other RNA
cctctagccacatcttctgt

SEQ ID NO: 385 - RNA, 20 nt, synthetic construct
  source 1..20: mol_type = other RNA
cccacagaagatgtggctag

SEQ ID NO: 386 - RNA, 20 nt, synthetic construct
  source 1..20: mol_type = other RNA
gtcagatcccacagaagatg

SEQ ID NO: 387 - RNA, 20 nt, synthetic construct
  source 1..20: mol_type = other RNA
atcttctgtgggatctgacc

SEQ ID NO: 388 - RNA, 20 nt, synthetic construct
  source 1..20: mol_type = other RNA
cccaggcagtgacagtgccc

SEQ ID NO: 389 - RNA, 20 nt, synthetic construct
  source 1..20: mol_type = other RNA
ctgggcactgtcactgcctg

SEQ ID NO: 390 - RNA, 20 nt, synthetic construct
  source 1..20: mol_type = other RNA
cctgggcactgtcactgcct

SEQ ID NO: 391 - RNA, 20 nt, synthetic construct
  source 1..20: mol_type = other RNA
ccctgggcactgtcactgcc

SEQ ID NO: 392 - RNA, 20 nt, synthetic construct
  source 1..20: mol_type = other RNA
ttgggtgttgggcggaacag

SEQ ID NO: 393 - RNA, 20 nt, synthetic construct
  source 1..20: mol_type = other RNA
tggatgtattgagcatgcga

SEQ ID NO: 394 - RNA, 20 nt, synthetic construct
  source 1..20: mol_type = other RNA
ggatgtattgagcatgcgat

SEQ ID NO: 395 - RNA, 20 nt, synthetic construct
  source 1..20: mol_type = other RNA
aacatgaagaaagcaggtgt

SEQ ID NO: 396 - RNA, 20 nt, synthetic construct
  source 1..20: mol_type = other RNA
tagcccacggcgatgaagcg

SEQ ID NO: 397 - RNA, 20 nt, synthetic construct
  source 1..20: mol_type = other RNA
gtagcccacggcgatgaagc

SEQ ID NO: 398 - RNA, 20 nt, synthetic construct
  source 1..20: mol_type = other RNA
cgtagcccacggcgatgaag

SEQ ID NO: 399 - RNA, 20 nt, synthetic construct
  source 1..20: mol_type = other RNA
cttcatcgccgtgggctacg

SEQ ID NO: 400 - RNA, 20 nt, synthetic construct
  source 1..20: mol_type = other RNA
cgtgtcgtccacgtagccca

SEQ ID NO: 401 - RNA, 20 nt, synthetic construct
  source 1..20: mol_type = other RNA
tggacgacacgcagttcgtg

SEQ ID NO: 402 - RNA, 20 nt, synthetic construct
  source 1..20: mol_type = other RNA
ggatggagccgcgggcgccg

SEQ ID NO: 403 - RNA, 20 nt, synthetic construct
  source 1..20: mol_type = other RNA
gcgggcgccgtggatagagc

SEQ ID NO: 404 - RNA, 20 nt, synthetic construct
  source 1..20: mol_type = other RNA
tgctctatccacggcgcccg

SEQ ID NO: 405 - RNA, 20 nt, synthetic construct
  source 1..20: mol_type = other RNA
ggcgccgtggatagagcagg

SEQ ID NO: 406 - RNA, 20 nt, synthetic construct
  source 1..20: mol_type = other RNA
gcgccgtggatagagcagga

SEQ ID NO: 407 - RNA, 20 nt, synthetic construct
  source 1..20: mol_type = other RNA
cgccgtggatagagcaggag

SEQ ID NO: 408 - RNA, 20 nt, synthetic construct
  source 1..20: mol_type = other RNA
gtggatagagcaggaggggc

SEQ ID NO: 409 - RNA, 20 nt, synthetic construct
  source 1..20: mol_type = other RNA
ggcccctcctgctctatcca

SEQ ID NO: 410 - RNA, 20 nt, synthetic construct
  source 1..20: mol_type = other RNA
agcaggaggggccggagtat

SEQ ID NO: 411 - RNA, 20 nt, synthetic construct
  source 1..20: mol_type = other RNA
gcaggaggggccggagtatt

SEQ ID NO: 412 - RNA, 20 nt, synthetic construct
  source 1..20: mol_type = other RNA
ggagtggctccgcagatacc

SEQ ID NO: 413 - RNA, 20 nt, synthetic construct
  source 1..20: mol_type = other RNA
ctccgcagatacctggagaa

SEQ ID NO: 414 - RNA, 20 nt, synthetic construct
  source 1..20: mol_type = other RNA
tccgcagatacctggagaac

SEQ ID NO: 415 - RNA, 20 nt, synthetic construct
  source 1..20: mol_type = other RNA
cagatacctggagaacggga

SEQ ID NO: 416 - RNA, 20 nt, synthetic construct
  source 1..20: mol_type = other RNA
tcccgttctccaggtatctg

SEQ ID NO: 417 - RNA, 20 nt, synthetic construct
  source 1..20: mol_type = other RNA
gcgtctccttcccgttctcc

SEQ ID NO: 418 - RNA, 20 nt, synthetic construct
  source 1..20: mol_type = other RNA
gaaggagacgctgcagcgca

SEQ ID NO: 419 - RNA, 20 nt, synthetic construct
  source 1..20: mol_type = other RNA
aaggagacgctgcagcgcac

SEQ ID NO: 420 - RNA, 20 nt, synthetic construct
  source 1..20: mol_type = other RNA
agatctacaggcgatcaggg

SEQ ID NO: 421 - RNA, 20 nt, synthetic construct
  source 1..20: mol_type = other RNA
tgatcgcctgtagatctccc

SEQ ID NO: 422 - RNA, 20 nt, synthetic construct
  source 1..20: mol_type = other RNA
gggagatctacaggcgatca

SEQ ID NO: 423 - RNA, 20 nt, synthetic construct
  source 1..20: mol_type = other RNA
cgggagatctacaggcgatc

SEQ ID NO: 424 - RNA, 20 nt, synthetic construct
  source 1..20: mol_type = other RNA
cgcctgtagatctcccgggc

SEQ ID NO: 425 - RNA, 20 nt, synthetic construct
  source 1..20: mol_type = other RNA
ggccagcccgggagatctac

SEQ ID NO: 426 - RNA, 20 nt, synthetic construct
  source 1..20: mol_type = other RNA
tcccgggctggcctcccaca

SEQ ID NO: 427 - RNA, 20 nt, synthetic construct
  source 1..20: mol_type = other RNA
gggctggcctcccacaagga

SEQ ID NO: 428 - RNA, 20 nt, synthetic construct
  source 1..20: mol_type = other RNA
ctgatcgcctgtagatctcc

SEQ ID NO: 429 - RNA, 20 nt, synthetic construct
  source 1..20: mol_type = other RNA
aggatggagccgcgggcgcc

SEQ ID NO: 430 - RNA, 20 nt, synthetic construct
  source 1..20: mol_type = other RNA
ggaaggagacgctgcagcgc

SEQ ID NO: 431 - RNA, 20 nt, synthetic construct
  source 1..20: mol_type = other RNA
gacagcgacgccgcgagcca

SEQ ID NO: 432 - RNA, 20 nt, synthetic construct
  source 1..20: mol_type = other RNA
cgggaaggagacgctgcagc

SEQ ID NO: 433 - RNA, 20 nt, synthetic construct
  source 1..20: mol_type = other RNA
ccgtgcgctgcagcgtctcc

SEQ ID NO: 434 - RNA, 24 nt, synthetic construct
  source 1..24: mol_type = other RNA
acgcagttcgtgcggttcgacagc

SEQ ID NO: 435 - RNA, 24 nt, synthetic construct
  source 1..24: mol_type = other RNA
tcgtgcggttcgacagcgacgccg

SEQ ID NO: 436 - RNA, 24 nt, synthetic construct
  source 1..24: mol_type = other RNA
cagcgacgccgcgagccagaggat

SEQ ID NO: 437 - RNA, 24 nt, synthetic construct
  source 1..24: mol_type = other RNA
gctctatccacggcgcccgcggct

SEQ ID NO: 438 - RNA, 24 nt, synthetic construct
  source 1..24: mol_type = other RNA
tcctgctctatccacggcgcccgc

SEQ ID NO: 439 - RNA, 24 nt, synthetic construct
  source 1..24: mol_type = other RNA
ccggcccctcctgctctatccacg

SEQ ID NO: 440 - RNA, 24 nt, synthetic construct
  source 1..24: mol_type = other RNA
tccggcccctcctgctctatccac

SEQ ID NO: 441 - RNA, 24 nt, synthetic construct
  source 1..24: mol_type = other RNA
gggaaggagacgctgcagcgcacg

SEQ ID NO: 442 - RNA, 24 nt, synthetic construct
  source 1..24: mol_type = other RNA
agacgctgcagcgcacgggtacca

SEQ ID NO: 443 - RNA, 24 nt, synthetic construct
  source 1..24: mol_type = other RNA
gcgcacgggtaccaggggccacgg

SEQ ID NO: 444 - RNA, 24 nt, synthetic construct
  source 1..24: mol_type = other RNA
cacgggtaccaggggccacggggc

SEQ ID NO: 445 - RNA, 24 nt, synthetic construct
  source 1..24: mol_type = other RNA
acgggtaccaggggccacggggcg

SEQ ID NO: 446 - RNA, 24 nt, synthetic construct
  source 1..24: mol_type = other RNA
caggggccacggggcgcctccctg

SEQ ID NO: 447 - RNA, 24 nt, synthetic construct
  source 1..24: mol_type = other RNA
cagggaggcgccccgtggcccctg

SEQ ID NO: 448 - RNA, 24 nt, synthetic construct
  source 1..24: mol_type = other RNA
tcagggaggcgccccgtggcccct

SEQ ID NO: 449 - RNA, 24 nt, synthetic construct
  source 1..24: mol_type = other RNA
caggcgatcagggaggcgccccgt

SEQ ID NO: 450 - RNA, 24 nt, synthetic construct
  source 1..24: mol_type = other RNA
acaggcgatcagggaggcgccccg

SEQ ID NO: 451 - RNA, 24 nt, synthetic construct
  source 1..24: mol_type = other RNA
tacaggcgatcagggaggcgcccc

SEQ ID NO: 452 - RNA, 24 nt, synthetic construct
  source 1..24: mol_type = other RNA
gggcgcctccctgatcgcctgtag

SEQ ID NO: 453 - RNA, 24 nt, synthetic construct
  source 1..24: mol_type = other RNA
ggcgcctccctgatcgcctgtaga

SEQ ID NO: 454 - RNA, 24 nt, synthetic construct
  source 1..24: mol_type = other RNA
gagatctacaggcgatcagggagg

SEQ ID NO: 455 - RNA, 24 nt, synthetic construct
  source 1..24: mol_type = other RNA
ggagatctacaggcgatcagggag

SEQ ID NO: 456 - RNA, 24 nt, synthetic construct
  source 1..24: mol_type = other RNA
gggagatctacaggcgatcaggga

SEQ ID NO: 457 - RNA, 24 nt, synthetic construct
  source 1..24: mol_type = other RNA
ctgatcgcctgtagatctcccggg

SEQ ID NO: 458 - RNA, 24 nt, synthetic construct
  source 1..24: mol_type = other RNA
atcgcctgtagatctcccgggctg

SEQ ID NO: 459 - RNA, 24 nt, synthetic construct
  source 1..24: mol_type = other RNA
tcgcctgtagatctcccgggctgg

SEQ ID NO: 460 - RNA, 24 nt, synthetic construct
  source 1..24: mol_type = other RNA
ttgtctcccctccttgtgggaggc

SEQ ID NO: 461 - RNA, 24 nt, synthetic construct
  source 1..24: mol_type = other RNA
attgtctcccctccttgtgggagg

SEQ ID NO: 462 - RNA, 24 nt, synthetic construct
  source 1..24: mol_type = other RNA
cccaattgtctcccctccttgtgg

SEQ ID NO: 463 - RNA, 20 nt, synthetic construct
  source 1..20: mol_type = other RNA
ggatggagccgcgggcgccg

SEQ ID NO: 464 - RNA, 20 nt, synthetic construct
  source 1..20: mol_type = other RNA
gcgggcgccgtggatagagc

SEQ ID NO: 465 - RNA, 20 nt, synthetic construct
  source 1..20: mol_type = other RNA
tgctctatccacggcgcccg

SEQ ID NO: 466 - RNA, 20 nt, synthetic construct
  source 1..20: mol_type = other RNA
ggcgccgtggatagagcagg

SEQ ID NO: 467 - RNA, 20 nt, synthetic construct
  source 1..20: mol_type = other RNA
gcgccgtggatagagcagga

SEQ ID NO: 468 - RNA, 20 nt, synthetic construct
  source 1..20: mol_type = other RNA
cgccgtggatagagcaggag

SEQ ID NO: 469 - RNA, 20 nt, synthetic construct
  source 1..20: mol_type = other RNA
gtggatagagcaggaggggc

SEQ ID NO: 470 - RNA, 20 nt, synthetic construct
  source 1..20: mol_type = other RNA
gcgtctccttcccgttctcc

SEQ ID NO: 471 - RNA, 20 nt, synthetic construct
  source 1..20: mol_type = other RNA
gaaggagacgctgcagcgca

SEQ ID NO: 472 - RNA, 20 nt, synthetic construct
  source 1..20: mol_type = other RNA
aaggagacgctgcagcgcac

SEQ ID NO: 473 - RNA, 20 nt, synthetic construct
  source 1..20: mol_type = other RNA
gctgcagcgcacgggtacca

SEQ ID NO: 474 - RNA, 20 nt, synthetic construct
  source 1..20: mol_type = other RNA
agatctacaggcgatcaggg

SEQ ID NO: 475 - RNA, 20 nt, synthetic construct
  source 1..20: mol_type = other RNA
ctgatcgcctgtagatctcc

SEQ ID NO: 476 - RNA, 20 nt, synthetic construct
  source 1..20: mol_type = other RNA
tgatcgcctgtagatctccc

SEQ ID NO: 477 - RNA, 20 nt, synthetic construct
  source 1..20: mol_type = other RNA
gggagatctacaggcgatca

SEQ ID NO: 478 - RNA, 20 nt, synthetic construct
  source 1..20: mol_type = other RNA
cgggagatctacaggcgatc

SEQ ID NO: 479 - RNA, 20 nt, synthetic construct
  source 1..20: mol_type = other RNA
cgcctgtagatctcccgggc

SEQ ID NO: 480 - RNA, 20 nt, synthetic construct
  source 1..20: mol_type = other RNA
ggccagcccgggagatctac

SEQ ID NO: 481 - RNA, 20 nt, synthetic construct
  source 1..20: mol_type = other RNA
tcccgggctggcctcccaca

SEQ ID NO: 482 - RNA, 20 nt, synthetic construct
  source 1..20: mol_type = other RNA
gggctggcctcccacaagga

SEQ ID NO: 483 - RNA, 20 nt, synthetic construct
  source 1..20: mol_type = other RNA
acgacactgattggcttctc

SEQ ID NO: 484 - RNA, 20 nt, synthetic construct
  source 1..20: mol_type = other RNA
acccctcatcccccacggac

SEQ ID NO: 485 - RNA, 20 nt, synthetic construct
  source 1..20: mol_type = other RNA
ggcccgtccgtgggggatga

SEQ ID NO: 486 - RNA, 20 nt, synthetic construct
  source 1..20: mol_type = other RNA
gccaggtcgcccacagtctc

SEQ ID NO: 487 - RNA, 20 nt, synthetic construct
  source 1..20: mol_type = other RNA
gtttaggccaaaaatccccc

SEQ ID NO: 488 - RNA, 20 nt, synthetic construct
  source 1..20: mol_type = other RNA
ggccaaaaatccccccgggt

SEQ ID NO: 489 - RNA, 20 nt, synthetic construct
  source 1..20: mol_type = other RNA
gaccaacccggggggatttt

SEQ ID NO: 490 - RNA, 20 nt, synthetic construct
  source 1..20: mol_type = other RNA
cacgggcccaaggctgctgc

SEQ ID NO: 491 - RNA, 20 nt, synthetic construct
  source 1..20: mol_type = other RNA
accctcatgctgcacatggc

SEQ ID NO: 492 - RNA, 20 nt, synthetic construct
  source 1..20: mol_type = other RNA
cctctaggaccttaaggccc

SEQ ID NO: 493 - RNA, 20 nt, synthetic construct
  source 1..20: mol_type = other RNA
gctcctttctggtatctcac

SEQ ID NO: 494 - RNA, 20 nt, synthetic construct
  source 1..20: mol_type = other RNA
gctatggggtttctttgcat

SEQ ID NO: 495 - RNA, 20 nt, synthetic construct
  source 1..20: mol_type = other RNA
gcctttgcagaaacaaagtc

SEQ ID NO: 496 - RNA, 20 nt, synthetic construct
  source 1..20: mol_type = other RNA
tggaccaaccgccctcctga

SEQ ID NO: 497 - RNA, 20 nt, synthetic construct
  source 1..20: mol_type = other RNA
agcctctctgacctttagca

SEQ ID NO: 498 - RNA, 20 nt, synthetic construct
  source 1..20: mol_type = other RNA
cgccctcctgaaggtcctca

SEQ ID NO: 499 - skipped

SEQ ID NO: 500 - RNA, 20 nt, synthetic construct
  source 1..20: mol_type = other RNA
ccgccctcctgaaggtcctc

SEQ ID NO: 501 - RNA, 20 nt, synthetic construct
  source 1..20: mol_type = other RNA
tggttccctttgacacacac

SEQ ID NO: 502 - RNA, 20 nt, synthetic construct
  source 1..20: mol_type = other RNA
gaccctgctaaaggtcagag

SEQ ID NO: 503 - RNA, 20 nt, synthetic construct
  source 1..20: mol_type = other RNA
aggaccttcaggagggcggt

SEQ ID NO: 504 - RNA, 20 nt, synthetic construct
  source 1..20: mol_type = other RNA
gcacacttctacctgggtct

SEQ ID NO: 505 - RNA, 20 nt, synthetic construct
  source 1..20: mol_type = other RNA
gagcctctctgacctttagc

SEQ ID NO: 506 - RNA, 20 nt, synthetic construct
  source 1..20: mol_type = other RNA
acactcctccagcacacatg

SEQ ID NO: 507 - RNA, 20 nt, synthetic construct
  source 1..20: mol_type = other RNA
ctctgacctttagcagggtc

SEQ ID NO: 508 - RNA, 20 nt, synthetic construct
  source 1..20: mol_type = other RNA
caagatagccacatgtgtgc

SEQ ID NO: 509 - RNA, 20 nt, synthetic construct
  source 1..20: mol_type = other RNA
tctgacctttagcagggtca

SEQ ID NO: 510 - RNA, 20 nt, synthetic construct
  source 1..20: mol_type = other RNA
tgtaaaggtgagagcctgga

SEQ ID NO: 511 - RNA, 20 nt, synthetic construct
  source 1..20: mol_type = other RNA
gaaggtccctgaggaccttc

SEQ ID NO: 512 - RNA, 24 nt, synthetic construct
  source 1..24: mol_type = other RNA
cctgggtctggtcctccccatccc

SEQ ID NO: 513 - RNA, 24 nt, synthetic construct
  source 1..24: mol_type = other RNA
gtggagaccaggcctgcaggggat

SEQ ID NO: 514 - RNA, 24 nt, synthetic construct
  source 1..24: mol_type = other RNA
ccgtgtcctgggtctggtcctccc

SEQ ID NO: 515 - RNA, 24 nt, synthetic construct
  source 1..24: mol_type = other RNA
tccgtgtcctgggtctggtcctcc

SEQ ID NO: 516 - RNA, 24 nt, synthetic construct
  source 1..24: mol_type = other RNA
cacatggcaggtgtatctctgctc

SEQ ID NO: 517 - RNA, 24 nt, synthetic construct
  source 1..24: mol_type = other RNA
tgctgcacatggcaggtgtatctc

SEQ ID NO: 518 - RNA, 24 nt, synthetic construct
  source 1..24: mol_type = other RNA
ccgcacgaactgcgtgtcgtccac

SEQ ID NO: 519 - RNA, 24 nt, synthetic construct
  source 1..24: mol_type = other RNA
cgcacgaactgcgtgtcgtccacg

SEQ ID NO: 520 - RNA, 24 nt, synthetic construct
  source 1..24: mol_type = other RNA
gtgcgctgcagcgtctccttcccg

SEQ ID NO: 521 - RNA, 24 nt, synthetic construct
  source 1..24: mol_type = other RNA
ccgaggatggccgtcatggcgccc

SEQ ID NO: 522 - RNA, 24 nt, synthetic construct
  source 1..24: mol_type = other RNA
cgaggatggccgtcatggcgcccc

SEQ ID NO: 523 - RNA, 24 nt, synthetic construct
  source 1..24: mol_type = other RNA
aaggttccatcccctgcaggcctg

SEQ ID NO: 524 - RNA, 24 nt, synthetic construct
  source 1..24: mol_type = other RNA
agaccaggcctgcaggggatggaa

SEQ ID NO: 525 - RNA, 24 nt, synthetic construct
  source 1..24: mol_type = other RNA
acttctggaaggttccatcccctg

SEQ ID NO: 526 - RNA, 24 nt, synthetic construct
  source 1..24: mol_type = other RNA
cgatgaagcggggctccccgcggc

SEQ ID NO: 527 - RNA, 24 nt, synthetic construct
  source 1..24: mol_type = other RNA
tccgtgtcccggcccggccgcggg

SEQ ID NO: 528 - RNA, 24 nt, synthetic construct
  source 1..24: mol_type = other RNA
ccgtgtcccggcccggccgcgggg

SEQ ID NO: 529 - RNA, 24 nt, synthetic construct
  source 1..24: mol_type = other RNA
cagacgccgaggatggccgtcatg

SEQ ID NO: 530 - RNA, 24 nt, synthetic construct
  source 1..24: mol_type = other RNA
ccagacgccgaggatggccgtcat

SEQ ID NO: 531 - RNA, 24 nt, synthetic construct
  source 1..24: mol_type = other RNA
agacgccgaggatggccgtcatgg

SEQ ID NO: 532 - RNA, 24 nt, synthetic construct
  source 1..24: mol_type = other RNA
ctgtcgaaccgcacgaactgcgtg

SEQ ID NO: 533 - RNA, 24 nt, synthetic construct
  source 1..24: mol_type = other RNA
tcgtgcggttcgacagcgacgccg

SEQ ID NO: 534 - RNA, 24 nt, synthetic construct
  source 1..24: mol_type = other RNA
ccatccccatcgtgggcatcattg

SEQ ID NO: 535 - RNA, 24 nt, synthetic construct
  source 1..24: mol_type = other RNA
tcctctggctcgcggcgtcgctgt

SEQ ID NO: 536 - RNA, 24 nt, synthetic construct
  source 1..24: mol_type = other RNA
ctctggttgtagtagccgcgcagg

SEQ ID NO: 537 - RNA, 24 nt, synthetic construct
  source 1..24: mol_type = other RNA
acctggggaccctgcgcggctact

SEQ ID NO: 538 - RNA, 24 nt, synthetic construct
  source 1..24: mol_type = other RNA
cgctctggttgtagtagccgcgca

SEQ ID NO: 539 - RNA, 24 nt, synthetic construct
  source 1..24: mol_type = other RNA
gctctggttgtagtagccgcgcag

SEQ ID NO: 540 - RNA, 24 nt, synthetic construct
  source 1..24: mol_type = other RNA
tatttttttctatagtgtgagaca

SEQ ID NO: 541 - RNA, 24 nt, synthetic construct
  source 1..24: mol_type = other RNA
acgcctacgacggcaaggattaca

SEQ ID NO: 542 - RNA, 24 nt, synthetic construct
  source 1..24: mol_type = other RNA
tttgttctaccccaggcagtgaca

SEQ ID NO: 543 - RNA, 24 nt, synthetic construct
  source 1..24: mol_type = other RNA
ttttgttctaccccaggcagtgac

SEQ ID NO: 544 - RNA, 24 nt, synthetic construct
  source 1..24: mol_type = other RNA
agcgaccacagctccagtgatcac

SEQ ID NO: 545 - RNA, 24 nt, synthetic construct
  source 1..24: mol_type = other RNA
gagctccgtgtcctgggtctggtc

SEQ ID NO: 546 - RNA, 24 nt, synthetic construct
  source 1..24: mol_type = other RNA
tccacgagctccgtgtcctgggtc

SEQ ID NO: 547 - RNA, 24 nt, synthetic construct
  source 1..24: mol_type = other RNA
acgagctccgtgtcctgggtctgg

SEQ ID NO: 548 - RNA, 24 nt, synthetic construct
  source 1..24: mol_type = other RNA
cgagctccgtgtcctgggtctggt

SEQ ID NO: 549 - RNA, 24 nt, synthetic construct
  source 1..24: mol_type = other RNA
gcaggcctggtctccacgagctcc

SEQ ID NO: 550 - RNA, 24 nt, synthetic construct
  source 1..24: mol_type = other RNA
tcccctgcaggcctggtctccacg

SEQ ID NO: 551 - RNA, 24 nt, synthetic construct
  source 1..24: mol_type = other RNA
atccgtgtcccggcccggccgcgg

SEQ ID NO: 552 - RNA, 24 nt, synthetic construct
  source 1..24: mol_type = other RNA
ccttcccgttctccaggtatctgc

SEQ ID NO: 553 - RNA, 24 nt, synthetic construct
  source 1..24: mol_type = other RNA
ccgttctccaggtatctgcggagc

SEQ ID NO: 554 - RNA, 24 nt, synthetic construct
  source 1..24: mol_type = other RNA
acctgccatgtgcagcatgagggt

SEQ ID NO: 555 - RNA, 24 nt, synthetic construct
  source 1..24: mol_type = other RNA
cacctgccatgtgcagcatgaggg

SEQ ID NO: 556 - RNA, 24 nt, synthetic construct
  source 1..24: mol_type = other RNA
acctggcagcgggatggggaggac

SEQ ID NO: 557 - RNA, 24 nt, synthetic construct
  source 1..24: mol_type = other RNA
cactgacctggcagcgggatgggg

SEQ ID NO: 558 - RNA, 24 nt, synthetic construct
  source 1..24: mol_type = other RNA
cctggcagcgggatggggaggacc

SEQ ID NO: 559 - RNA, 24 nt, synthetic construct
  source 1..24: mol_type = other RNA
ccatctcagggtgaggggcttggg

SEQ ID NO: 560 - RNA, 24 nt, synthetic construct
  source 1..24: mol_type = other RNA
tggccgtcatggcgccccgaaccc

SEQ ID NO: 561 - RNA, 24 nt, synthetic construct
  source 1..24: mol_type = other RNA
atgtccgccgcggtccaagagcgc

SEQ ID NO: 562 - RNA, 24 nt, synthetic construct
  source 1..24: mol_type = other RNA
ggtacccgtgcgctgcagcgtctc

SEQ ID NO: 563 - RNA, 24 nt, synthetic construct
  source 1..24: mol_type = other RNA
gggaaggagacgctgcagcgcacg

SEQ ID NO: 564 - RNA, 24 nt, synthetic construct
  source 1..24: mol_type = other RNA
gcgggcgccgtggatagagcagga

SEQ ID NO: 565 - RNA, 24 nt, synthetic construct
  source 1..24: mol_type = other RNA
tcctgctctatccacggcgcccgc

SEQ ID NO: 566 - RNA, 24 nt, synthetic construct
  source 1..24: mol_type = other RNA
cccctggtacccgtgcgctgcagc

SEQ ID NO: 567 - RNA, 24 nt, synthetic construct
  source 1..24: mol_type = other RNA
tggtacccgtgcgctgcagcgtct

SEQ ID NO: 568 - RNA, 24 nt, synthetic construct
  source 1..24: mol_type = other RNA
catctcagggtgaggggcttgggc

SEQ ID NO: 569 - RNA, 24 nt, synthetic construct
  source 1..24: mol_type = other RNA
acgcagttcgtgcggttcgacagc

SEQ ID NO: 570 - RNA, 24 nt, synthetic construct
  source 1..24: mol_type = other RNA
cgcccaggtctgggtcagggccag

SEQ ID NO: 571 - RNA, 24 nt, synthetic construct
  source 1..24: mol_type = other RNA
cactcacccgcccaggtctgggtc

SEQ ID NO: 572 - RNA, 24 nt, synthetic construct
  source 1..24: mol_type = other RNA
ccgcccaggtctgggtcagggcca

SEQ ID NO: 573 - RNA, 24 nt, synthetic construct
  source 1..24: mol_type = other RNA
cccgcccaggtctgggtcagggcc

SEQ ID NO: 574 - RNA, 24 nt, synthetic construct
  source 1..24: mol_type = other RNA
cagcgacgccgcgagccagaggat

SEQ ID NO: 575 - RNA, 24 nt, synthetic construct
  source 1..24: mol_type = other RNA
cgcgagccagaggatggagccgcg

SEQ ID NO: 576 - RNA, 24 nt, synthetic construct
  source 1..24: mol_type = other RNA
gctctatccacggcgcccgcggct

SEQ ID NO: 577 - RNA, 24 nt, synthetic construct
  source 1..24: mol_type = other RNA
cacatcagagccctgggcactgtc

SEQ ID NO: 578 - RNA, 24 nt, synthetic construct
  source 1..24: mol_type = other RNA
cagacccaggacacggagctcgtg

SEQ ID NO: 579 - RNA, 24 nt, synthetic construct
  source 1..24: mol_type = other RNA
ccaggacacggagctcgtggagac

SEQ ID NO: 580 - RNA, 24 nt, synthetic construct
  source 1..24: mol_type = other RNA
ctctgggaaaagaggggaaggtga

SEQ ID NO: 581 - RNA, 24 nt, synthetic construct
  source 1..24: mol_type = other RNA
tctgggaaaagaggggaaggtgag

SEQ ID NO: 582 - RNA, 24 nt, synthetic construct
  source 1..24: mol_type = other RNA
agacgctgcagcgcacgggtacca

SEQ ID NO: 583 - RNA, 24 nt, synthetic construct
  source 1..24: mol_type = other RNA
tccttttctatctgtgggaagaaa

SEQ ID NO: 584 - RNA, 24 nt, synthetic construct
  source 1..24: mol_type = other RNA
cactgcctggggtagaacaaaaac

SEQ ID NO: 585 - RNA, 24 nt, synthetic construct
  source 1..24: mol_type = other RNA
acaaccagagcgaggccggtgagt

SEQ ID NO: 586 - RNA, 24 nt, synthetic construct
  source 1..24: mol_type = other RNA
ctacaaccagagcgaggccggtga

SEQ ID NO: 587 - RNA, 24 nt, synthetic construct
  source 1..24: mol_type = other RNA
tacaaccagagcgaggccggtgag

SEQ ID NO: 588 - RNA, 24 nt, synthetic construct
  source 1..24: mol_type = other RNA
ccagagcgaggccggtgagtgacc

SEQ ID NO: 589 - RNA, 24 nt, synthetic construct
  source 1..24: mol_type = other RNA
ccatcccgctgccaggtcagtgtg

SEQ ID NO: 590 - RNA, 24 nt, synthetic construct
  source 1..24: mol_type = other RNA
gtatctgcggagccactccacgca

SEQ ID NO: 591-599 - skipped (9 entries)

SEQ ID NO: 600 - RNA, 76 nt, synthetic construct
  source 1..76: mol_type = other RNA
gttttagagctagaaatagcaagttaaaataaggctagtccgttatcaacttgaaaaagtggcaccgagtcggtgc

SEQ ID NO: 601 - RNA, 22 nt, synthetic construct
  source 1..22: mol_type = other RNA
gttttagagctatgctgttttg

SEQ ID NO: 602 - RNA, 80 nt, synthetic construct
  source 1..80: mol_type = other RNA
gttttagagctagaaatagcaagttaaaataaggctagtccgttatcaacttgaaaaagtggcaccgagtcggtgctttt

SEQ ID NO: 603 - RNA, 76 nt, synthetic construct; identical to SEQ ID NO: 600
  source 1..76: mol_type = other RNA

SEQ ID NO: 604 - RNA, 68 nt, synthetic construct
  source 1..68: mol_type = other RNA
gttttagagctagaaatagcaagttaaaataaggctagtccgttatcaacttggcaccgagtcggtgc

SEQ ID NO: 605 - RNA, 24 nt, synthetic construct
  source 1..24: mol_type = other RNA
aaaacctgtcagtgattgggttcc

SEQ ID NO: 606 - RNA, 24 nt, synthetic construct
  source 1..24: mol_type = other RNA
ttaggttcgtatctgtaaaaccaa

SEQ ID NO: 607 - RNA, 24 nt, synthetic construct
  source 1..24: mol_type = other RNA
gtgtcctaccagcaaggggtcctg

SEQ ID NO: 608 - RNA, 24 nt, synthetic construct
  source 1..24: mol_type = other RNA
tcaaagtaccctacaggaggacca

SEQ ID NO: 609 - RNA, 24 nt, synthetic construct
  source 1..24: mol_type = other RNA
agctgccgttctgcccagtccggg

SEQ ID NO: 610 - RNA, 24 nt, synthetic construct
  source 1..24: mol_type = other RNA
gcatgggcaggggctggggtgcac

SEQ ID NO: 611 - RNA, 24 nt, synthetic construct
  source 1..24: mol_type = other RNA
gaatggcaggcggaggttgtactg

SEQ ID NO: 612 - RNA, 24 nt, synthetic construct
  source 1..24: mol_type = other RNA
gtgagcaggcacctgtgccaacat

SEQ ID NO: 613-698 - skipped (86 entries)

SEQ ID NO: 699 - RNA, 121 nt, synthetic construct
  source 1..121: mol_type = other RNA
gttgtagctccctttctcatttcggaaacgaaatgagaaccgttgctacaataaggccgtctgaaaagatgtgccgcaacgctctgccccttaaagcttctgctttaaggggcatcgttta

SEQ ID NO: 700 - RNA, 146 nt, synthetic construct
  source 1..146: mol_type = other RNA
  misc_difference 1: note = a, c, u, g, unknown or other
  misc_difference 2: note = a, c, u, g, unknown or other
  misc_difference 3: note = a, c, u, g, unknown or other
  misc_difference 4: note = a, c, u, g, unknown or other
  misc_difference 5: note = a, c, u, g, unknown or other
  misc_difference 6: note = a, c, u, g, unknown or other
  misc_difference 7: note = a, c, u, g, unknown or other
  misc_difference 8: note = a, c, u, g, unknown or other
  misc_difference 9: note = a, c, u, g, unknown or other
  misc_difference 10: note = a, c, u, g, unknown or other
  misc_difference 11: note = a, c, u, g, unknown or other
  misc_difference 12: note = a, c, u, g, unknown or other
  misc_difference 13: note = a, c, u, g, unknown or other
  misc_difference 14: note = a, c, u, g, unknown or other
  misc_difference 15: note = a, c, u, g, unknown or other
  misc_difference 16: note = a, c, u, g, unknown or other
  misc_difference 17: note = a, c, u, g, unknown or other
  misc_difference 18: note = a, c, u, g, unknown or other
  misc_difference 19: note = a, c, u, g, unknown or other
  misc_difference 20: note = a, c, u, g, unknown or other
  misc_difference 21: note = a, c, u, g, unknown or other
  misc_difference 22: note = a, c, u, g, unknown or other
  misc_difference 23: note = a, c, u, g, unknown or other
  misc_difference 24: note = a, c, u, g, unknown or other
  misc_difference 25: note = a, c, u, g, unknown or other
  misc_difference 1..25: note = This region may encompass 20-25 nucleotides
nnnnnnnnnnnnnnnnnnnnnnnnngttgtagctccctttctcatttcggaaacgaaatgagaaccgttgctacaataaggccgtctgaaaagatgtgccgcaacgctctgccccttaaagcttctgctttaaggggcatcgttta

SEQ ID NO: 701 - RNA, 77 nt, synthetic construct
  source 1..77: mol_type = other RNA
gttgtagctccctgaaaccgttgctacaataaggccgtcgaaagatgtgccgcaacgctctgccttctggcatcgtt

SEQ ID NO: 702 - RNA, 81 nt, synthetic construct
  source 1..81: mol_type = other RNA
gttgtagctccctgaaaccgttgctacaataaggccgtcgaaagatgtgccgcaacgctctgccttctggcatcgtttatt

SEQ ID NO: 703 - RNA, 83 nt, synthetic construct
  source 1..83: mol_type = other RNA
gttgtagctccctggaaacccgttgctacaataaggccgtcgaaagatgtgccgcaacgctctgccttctggcatcgtttatt

SEQ ID NO: 704 - RNA, 106 nt, synthetic construct
  source 1..106: mol_type = other RNA
  misc_difference 1: note = a, c, u, g, unknown or other
  misc_difference 2: note = a, c, u, g, unknown or other
  misc_difference 3: note = a, c, u, g, unknown or other
  misc_difference 4: note = a, c, u, g, unknown or other
  misc_difference 5: note = a, c, u, g, unknown or other
  misc_difference 6: note = a, c, u, g, unknown or other
  misc_difference 7: note = a, c, u, g, unknown or other
  misc_difference 8: note = a, c, u, g, unknown or other
  misc_difference 9: note = a, c, u, g, unknown or other
  misc_difference 10: note = a, c, u, g, unknown or other
  misc_difference 11: note = a, c, u, g, unknown or other
  misc_difference 12: note = a, c, u, g, unknown or other
  misc_difference 13: note = a, c, u, g, unknown or other
  misc_difference 14: note = a, c, u, g, unknown or other
  misc_difference 15: note = a, c, u, g, unknown or other
  misc_difference 16: note = a, c, u, g, unknown or other
  misc_difference 17: note = a, c, u, g, unknown or other
  misc_difference 18: note = a, c, u, g, unknown or other
  misc_difference 19: note = a, c, u, g, unknown or other
  misc_difference 20: note = a, c, u, g, unknown or other
  misc_difference 21: note = a, c, u, g, unknown or other
  misc_difference 22: note = a, c, u, g, unknown or other
  misc_difference 23: note = a, c, u, g, unknown or other
  misc_difference 24: note = a, c, u, g, unknown or other
  misc_difference 25: note = a, c, u, g, unknown or other
  misc_difference 1..25: note = This region may encompass 20-25 nucleotides
nnnnnnnnnnnnnnnnnnnnnnnnngttgtagctcccttcgaaagaccgttgctacaataaggccgtcgaaagatgtgccgcaacgctctgccttctggcatcgtt

SEQ ID NO: 705 - RNA, 101 nt, synthetic construct
  source 1..101: mol_type = other RNA
  misc_difference 1: note = 2'-O-methyl modified adenosine, cytidine, guanosine, uridine, unknown or other nucleotide with phosphorothioate linkage
  misc_difference 2: note = 2'-O-methyl modified adenosine, cytidine, guanosine, uridine, unknown or other nucleotide
  misc_difference 3: note = a, c, u, g, unknown or other
  misc_difference 4: note = a, c, u, g, unknown or other
  misc_difference 5: note = a, c, u, g, unknown or other
  misc_difference 6: note = a, c, u, g, unknown or other
  misc_difference 7: note = a, c, u, g, unknown or other
  misc_difference 8: note = a, c, u, g, unknown or other
  misc_difference 9: note = a, c, u, g, unknown or other
  misc_difference 10: note = 2'-O-methyl modified adenosine, cytidine, guanosine, uridine, unknown or other nucleotide
  misc_difference 11: note = a, c, u, g, unknown or other
  misc_difference 12: note = a, c, u, g, unknown or other
  misc_difference 13: note = 2'-O-methyl modified adenosine, cytidine, guanosine, uridine, unknown or other nucleotide
  misc_difference 14: note = a, c, u, g, unknown or other
  misc_difference 15: note = a, c, u, g, unknown or other
  misc_difference 16: note = a, c, u, g, unknown or other
  misc_difference 17: note = a, c, u, g, unknown or other
  misc_difference 18: note = a, c, u, g, unknown or other
  misc_difference 19: note = a, c, u, g, unknown or other
  misc_difference 20: note = a, c, u, g, unknown or other
  misc_difference 21: note = a, c, u, g, unknown or other
  misc_difference 22: note = a, c, u, g, unknown or other
  misc_difference 23: note = a, c, u, g, unknown or other
  misc_difference 24: note = a, c, u, g, unknown or other
  modified_base 25: mod_base = OTHER; note = 2'-O-methyl modified nucleotide
  modified_base 29: mod_base = OTHER; note = 2'-O-methyl modified nucleotide
  modified_base 30: mod_base = OTHER; note = 2'-O-methyl modified nucleotide
  modified_base 31: mod_base = OTHER; note = 2'-O-methyl modified nucleotide
  modified_base 32: mod_base = OTHER; note = 2'-O-methyl modified nucleotide
  modified_base 37: mod_base = OTHER; note = 2'-O-methyl modified nucleotide
  modified_base 38: mod_base = OTHER; note = 2'-O-methyl modified nucleotide
  modified_base 39: mod_base = OTHER; note = 2'-O-methyl modified nucleotide
  modified_base 40: mod_base = OTHER; note = 2'-O-methyl modified nucleotide
  modified_base 41: mod_base = OTHER; note = 2'-O-methyl modified nucleotide
  modified_base 42: mod_base = OTHER; note = 2'-O-methyl modified nucleotide
  modified_base 43: mod_base = OTHER; note = 2'-O-methyl modified nucleotide
  modified_base 47: mod_base = OTHER; note = 2'-O-methyl modified nucleotide
  modified_base 48: mod_base = OTHER; note = 2'-O-methyl modified nucleotide
  modified_base 51: mod_base = OTHER; note = 2'-O-methyl modified nucleotide
  modified_base 54: mod_base = OTHER; note = nucleotide with phosphorothioate linkage
  modified_base 58: mod_base = OTHER; note = 2'-O-methyl modified nucleotide
  modified_base 59: mod_base = OTHER; note = 2'-O-methyl modified nucleotide
  modified_base 61: mod_base = OTHER; note = 2'-O-methyl modified nucleotide
  modified_base 62: mod_base = OTHER; note = 2'-O-methyl modified nucleotide
  modified_base 63: mod_base = OTHER; note = 2'-O-methyl modified nucleotide
  modified_base 64: mod_base = OTHER; note = 2'-O-methyl modified nucleotide
  modified_base 65: mod_base = OTHER; note = 2'-O-methyl modified nucleotide
  modified_base 66: mod_base = OTHER; note = 2'-O-methyl modified nucleotide
  modified_base 67: mod_base = OTHER; note = 2'-O-methyl modified nucleotide
  modified_base 68: mod_base = OTHER; note = 2'-O-methyl modified nucleotide
  modified_base 69: mod_base = OTHER; note = 2'-O-methyl modified nucleotide
  modified_base 70: mod_base = OTHER; note = 2'-O-methyl modified nucleotide
  modified_base 75: mod_base = OTHER; note = 2'-O-methyl modified nucleotide
  modified_base 78: mod_base = OTHER; note = 2'-O-methyl modified nucleotide
  modified_base 79: mod_base = OTHER; note = 2'-O-methyl modified nucleotide
  modified_base 80: mod_base = OTHER; note = 2'-O-methyl modified nucleotide
  modified_base 81: mod_base = OTHER; note = 2'-O-methyl modified nucleotide
  modified_base 86: mod_base = OTHER; note = 2'-O-methyl modified nucleotide
  modified_base 87: mod_base = OTHER; note = 2'-O-methyl modified nucleotide
  modified_base 89: mod_base = OTHER; note = 2'-O-methyl modified nucleotide
  modified_base 90: mod_base = OTHER; note = 2'-O-methyl modified nucleotide
  modified_base 91: mod_base = OTHER; note = 2'-O-methyl modified nucleotide
  modified_base 92: mod_base = OTHER; note = 2'-O-methyl modified nucleotide
  modified_base 94: mod_base = OTHER; note = 2'-O-methyl modified nucleotide
  modified_base 96: mod_base = OTHER; note = 2'-O-methyl modified nucleotide
  modified_base 97: mod_base = OTHER; note = 2'-O-methyl modified nucleotide
  modified_base 98: mod_base = OTHER; note = nucleotide with phosphorothioate linkage
  modified_base 99: mod_base = OTHER; note = 2'-O-methyl modified nucleotide with phosphorothioate linkage
  modified_base 100: mod_base = OTHER; note = 2'-O-methyl modified nucleotide with phosphorothioate linkage
  modified_base 101: mod_base = OTHER; note = 2'-O-methyl modified nucleotide
nnnnnnnnnnnnnnnnnnnnnnnngttgtagctccctgaaaccgttgctacaataaggccgtcgaaagatgtgccgcaacgctctgccttctggcatcgtt

SEQ ID NO: 706 - RNA, 102 nt, synthetic construct
  source 1..102: mol_type = other RNA
  misc_difference 1: note = a, c, u, g, unknown or other
  misc_difference 2: note = a, c, u, g, unknown or other
  misc_difference 3: note = a, c, u, g, unknown or other
  misc_difference 4: note = a, c, u, g, unknown or other
  misc_difference 5: note = a, c, u, g, unknown or other
  misc_difference 6: note = a, c, u, g, unknown or other
  misc_difference 7: note = a, c, u, g, unknown or other
  misc_difference 8: note = a, c, u, g, unknown or other
  misc_difference 9: note = a, c, u, g, unknown or other
  misc_difference 10: note = a, c, u, g, unknown or other
  misc_difference 11: note = a, c, u, g, unknown or other
  misc_difference 12: note = a, c, u, g, unknown or other
  misc_difference 13: note = a, c, u, g, unknown or other
  misc_difference 14: note = a, c, u, g, unknown or other
  misc_difference 15: note = a, c, u, g, unknown or other
  misc_difference 16: note = a, c, u, g, unknown or other
  misc_difference 17: note = a, c, u, g, unknown or other
  misc_difference 18: note = a, c, u, g, unknown or other
  misc_difference 19: note = a, c, u, g, unknown or other
  misc_difference 20: note = a, c, u, g, unknown or other
  misc_difference 21: note = a, c, u, g, unknown or other
  misc_difference 22: note = a, c, u, g, unknown or other
  misc_difference 23: note = a, c, u, g, unknown or other
  misc_difference 24: note = a, c, u, g, unknown or other
  misc_difference 25: note = a, c, u, g, unknown or other
  modified_base 30: mod_base = OTHER; note = 2'-O-methyl modified nucleotide
  modified_base 31: mod_base = OTHER; note = 2'-O-methyl modified nucleotide
  modified_base 32: mod_base = OTHER; note = 2'-O-methyl modified nucleotide
  modified_base 33: mod_base = OTHER; note = 2'-O-methyl modified nucleotide
  modified_base 38: mod_base = OTHER; note = 2'-O-methyl modified nucleotide
  modified_base 39: mod_base = OTHER; note = 2'-O-methyl modified nucleotide
  modified_base 40: mod_base = OTHER; note = 2'-O-methyl modified nucleotide
  modified_base 41: mod_base = OTHER; note = 2'-O-methyl modified nucleotide
  modified_base 42: mod_base = OTHER; note = 2'-O-methyl modified nucleotide
  modified_base 43: mod_base = OTHER; note = 2'-O-methyl modified nucleotide
  modified_base 44: mod_base = OTHER; note = 2'-O-methyl modified nucleotide
  modified_base 48: mod_base = OTHER; note = 2'-O-methyl modified nucleotide
  modified_base 49: mod_base = OTHER; note = 2'-O-methyl modified nucleotide
  modified_base 52: mod_base = OTHER; note = 2'-O-methyl modified nucleotide
  modified_base 55: mod_base = OTHER; note = nucleotide with phosphorothioate linkage
  modified_base 59: mod_base = OTHER; note = 2'-O-methyl modified nucleotide
  modified_base 60: mod_base = OTHER; note = 2'-O-methyl modified nucleotide
  modified_base 62: mod_base = OTHER; note = 2'-O-methyl modified nucleotide
  modified_base 63: mod_base = OTHER; note = 2'-O-methyl modified nucleotide
  modified_base 64: mod_base = OTHER; note = 2'-O-methyl modified nucleotide
  modified_base 65: mod_base = OTHER; note = 2'-O-methyl modified nucleotide
  modified_base 66: mod_base = OTHER; note = 2'-O-methyl modified nucleotide
  modified_base 67: mod_base = OTHER; note = 2'-O-methyl modified nucleotide
  modified_base 68: mod_base = OTHER; note = 2'-O-methyl modified nucleotide
  modified_base 69: mod_base = OTHER; note = 2'-O-methyl modified nucleotide
  modified_base 70: mod_base = OTHER; note = 2'-O-methyl modified nucleotide
  modified_base 71: mod_base = OTHER; note = 2'-O-methyl modified nucleotide
  modified_base 76: mod_base = OTHER; note = 2'-O-methyl modified nucleotide
  modified_base 79: mod_base = OTHER; note = 2'-O-methyl modified nucleotide
  modified_base 80: mod_base = OTHER; note = 2'-O-methyl modified nucleotide
  modified_base 81: mod_base = OTHER; note = 2'-O-methyl modified nucleotide
  modified_base 82: mod_base = OTHER; note = 2'-O-methyl modified nucleotide
  modified_base 87: mod_base = OTHER; note = 2'-O-methyl modified nucleotide
  modified_base 88: mod_base = OTHER; note = 2'-O-methyl modified nucleotide
  modified_base 90: mod_base = OTHER; note = 2'-O-methyl modified nucleotide
  modified_base 91: mod_base = OTHER; note = 2'-O-methyl modified nucleotide
  modified_base 92: mod_base = OTHER; note = 2'-O-methyl modified nucleotide
  modified_base 93: mod_base = OTHER; note = 2'-O-methyl modified nucleotide
  modified_base 95: mod_base = OTHER; note = 2'-O-methyl modified nucleotide
  modified_base 97: mod_base = OTHER; note = 2'-O-methyl modified nucleotide
  modified_base 98: mod_base = OTHER; note = 2'-O-methyl modified nucleotide
  modified_base 99: mod_base = OTHER; note = nucleotide with phosphorothioate linkage
  modified_base 100: mod_base = OTHER; note = 2'-O-methyl modified nucleotide with phosphorothioate linkage
  modified_base 101: mod_base = OTHER; note = 2'-O-methyl modified nucleotide with phosphorothioate linkage
  modified_base 102: mod_base = OTHER; note = 2'-O-methyl modified nucleotide
  misc_difference 1..25: note = This region may encompass 20-25 nucleotides
nnnnnnnnnnnnnnnnnnnnnnnnngttgtagctccctgaaaccgttgctacaataaggccgtcgaaagatgtgccgcaacgctctgccttctggcatcgtt

SEQ ID NO: 707 - RNA, 77 nt, synthetic construct; identical to SEQ ID NO: 701
  source 1..77: mol_type = other RNA
  modified_base 5: mod_base = OTHER; note = 2'-O-methyl modified nucleotide
  modified_base 6: mod_base = OTHER; note = 2'-O-methyl modified nucleotide
  modified_base 7: mod_base = OTHER; note = 2'-O-methyl modified nucleotide
  modified_base 8: mod_base = OTHER; note = 2'-O-methyl modified nucleotide
  modified_base 13: mod_base = OTHER; note = 2'-O-methyl modified nucleotide
  modified_base 14: mod_base = OTHER; note = 2'-O-methyl modified nucleotide
  modified_base 15: mod_base = OTHER; note = 2'-O-methyl modified nucleotide
  modified_base 16: mod_base = OTHER; note = 2'-O-methyl modified nucleotide
  modified_base 17: mod_base = OTHER; note = 2'-O-methyl modified nucleotide
  modified_base 18: mod_base = OTHER; note = 2'-O-methyl modified nucleotide
  modified_base 19: mod_base = OTHER; note = 2'-O-methyl modified nucleotide
  modified_base 23: mod_base = OTHER; note = 2'-O-methyl modified nucleotide
  modified_base 24: mod_base = OTHER; note = 2'-O-methyl modified nucleotide
  modified_base 27: mod_base = OTHER; note = 2'-O-methyl modified nucleotide
  modified_base 30: mod_base = OTHER; note = nucleotide with phosphorothioate linkage
  modified_base 34: mod_base = OTHER; note = 2'-O-methyl modified nucleotide
  modified_base 35: mod_base = OTHER; note = 2'-O-methyl modified nucleotide
  modified_base 37: mod_base = OTHER; note = 2'-O-methyl modified nucleotide
  modified_base 38: mod_base = OTHER; note = 2'-O-methyl modified nucleotide
  modified_base 39: mod_base = OTHER; note = 2'-O-methyl modified nucleotide
  modified_base 40: mod_base = OTHER; note = 2'-O-methyl modified nucleotide
  modified_base 41: mod_base = OTHER; note = 2'-O-methyl modified nucleotide
  modified_base 42: mod_base = OTHER; note = 2'-O-methyl modified nucleotide
  modified_base 43: mod_base = OTHER; note = 2'-O-methyl modified nucleotide
  modified_base 44: mod_base = OTHER; note = 2'-O-methyl modified nucleotide
  modified_base 45: mod_base = OTHER; note = 2'-O-methyl modified nucleotide
  modified_base 46: mod_base = OTHER; note = 2'-O-methyl modified nucleotide
  modified_base 51: mod_base = OTHER; note = 2'-O-methyl modified nucleotide
  modified_base 54: mod_base = OTHER; note = 2'-O-methyl modified nucleotide
  modified_base 55: mod_base = OTHER; note = 2'-O-methyl modified nucleotide
  modified_base 56: mod_base = OTHER; note = 2'-O-methyl modified nucleotide
  modified_base 57: mod_base = OTHER; note = 2'-O-methyl modified nucleotide
  modified_base 62: mod_base = OTHER; note = 2'-O-methyl modified nucleotide
  modified_base 63: mod_base = OTHER; note = 2'-O-methyl modified nucleotide
  modified_base 65: mod_base = OTHER; note = 2'-O-methyl modified nucleotide
  modified_base 66: mod_base = OTHER; note = 2'-O-methyl modified nucleotide
  modified_base 67: mod_base = OTHER; note = 2'-O-methyl modified nucleotide
  modified_base 68: mod_base = OTHER; note = 2'-O-methyl modified nucleotide
  modified_base 70: mod_base = OTHER; note = 2'-O-methyl modified nucleotide
  modified_base 72: mod_base = OTHER; note = 2'-O-methyl modified nucleotide
  modified_base 73: mod_base = OTHER; note = 2'-O-methyl modified nucleotide
  modified_base 74: mod_base = OTHER; note = nucleotide with phosphorothioate linkage
  modified_base 75: mod_base = OTHER; note = 2'-O-methyl modified nucleotide with phosphorothioate linkage
  modified_base 76: mod_base = OTHER; note = 2'-O-methyl modified nucleotide with phosphorothioate linkage
  modified_base 77: mod_base = OTHER; note = 2'-O-methyl modified nucleotide

SEQ ID NO: 708 - RNA, 101 nt, synthetic construct; identical to SEQ ID NO: 705
  source 1..101: mol_type = other RNA
  misc_difference 1: note = 2'-O-methyl modified adenosine, cytidine, guanosine, uridine, unknown or other nucleotide with phosphorothioate linkage
  misc_difference 2: note = 2'-O-methyl modified adenosine, cytidine, guanosine, uridine, unknown or other nucleotide with phosphorothioate linkage
  misc_difference 3: note = 2'-O-methyl modified adenosine, cytidine, guanosine, uridine, unknown or other nucleotide with phosphorothioate linkage
  misc_difference 4: note = 2'-O-methyl modified adenosine, cytidine, guanosine, uridine, unknown or other nucleotide
  misc_difference 5: note = 2'-O-methyl modified adenosine, cytidine, guanosine, uridine, unknown or other nucleotide
  misc_difference 6: note = a, c, u, g, unknown or other
  misc_difference 7: note = a, c, u, g, unknown or other
  misc_difference 8: note = 2'-O-methyl modified adenosine, cytidine, guanosine, uridine, unknown or other nucleotide
  misc_difference 9: note = 2'-O-methyl modified adenosine, cytidine, guanosine, uridine, unknown or other nucleotide
  misc_difference 10: note = a, c, u, g, unknown or other
  misc_difference 11: note = 2'-O-methyl modified adenosine, cytidine, guanosine, uridine, unknown or other nucleotide
  misc_difference 12: note = a, c, u, g, unknown or other
  misc_difference 13: note = 2'-O-methyl modified adenosine, cytidine, guanosine, uridine, unknown or other nucleotide
  misc_difference 14: note = a, c, u, g, unknown or other
  misc_difference 15: note = a, c, u, g, unknown or other
  misc_difference 16: note = a, c, u, g, unknown or other
  misc_difference 17: note = a, c, u, g, unknown or other
  misc_difference 18: note = 2'-O-methyl modified adenosine, cytidine, guanosine, uridine, unknown or other nucleotide
  misc_difference 19: note = a, c, u, g, unknown or other
  misc_difference 20: note = a, c, u, g, unknown or other
  misc_difference 21: note = a, c, u, g, unknown or other
  misc_difference 22: note = 2'-O-methyl modified adenosine, cytidine, guanosine, uridine, unknown or other nucleotide
  misc_difference 23: note = a, c, u, g, unknown or other
  misc_difference 24: note = a, c, u, g, unknown or other
  modified_base 25: mod_base = OTHER; note = 2'-O-methyl modified nucleotide
  modified_base 29: mod_base = OTHER; note = 2'-O-methyl modified nucleotide
  modified_base 30: mod_base = OTHER; note = 2'-O-methyl modified nucleotide
  modified_base 31: mod_base = OTHER; note = 2'-O-methyl modified nucleotide
  modified_base 32: mod_base = OTHER; note = 2'-O-methyl modified nucleotide
  modified_base 37: mod_base = OTHER; note = 2'-O-methyl modified nucleotide
  modified_base 38: mod_base = OTHER; note = 2'-O-methyl modified nucleotide
  modified_base 39: mod_base = OTHER; note = 2'-O-methyl modified nucleotide
  modified_base 40: mod_base = OTHER; note = 2'-O-methyl modified nucleotide
  modified_base 41: mod_base = OTHER; note = 2'-O-methyl modified nucleotide
  modified_base 42: mod_base = OTHER; note = 2'-O-methyl modified nucleotide
  modified_base 43: mod_base = OTHER; note = 2'-O-methyl modified nucleotide
  modified_base 47: mod_base = OTHER; note = 2'-O-methyl modified nucleotide
  modified_base 48: mod_base = OTHER; note = 2'-O-methyl modified nucleotide
  modified_base 51: mod_base = OTHER; note = 2'-O-methyl modified nucleotide
  modified_base 54: mod_base = OTHER; note = nucleotide with phosphorothioate linkage
  modified_base 58: mod_base = OTHER; note = 2'-O-methyl modified nucleotide
  modified_base 59: mod_base = OTHER; note = 2'-O-methyl modified nucleotide
  modified_base 61: mod_base = OTHER; note = 2'-O-methyl modified nucleotide
  modified_base 62: mod_base = OTHER; note = 2'-O-methyl modified nucleotide
  modified_base 63: mod_base = OTHER; note = 2'-O-methyl modified nucleotide
  modified_base 64: mod_base = OTHER; note = 2'-O-methyl modified nucleotide
  modified_base 65: mod_base = OTHER; note = 2'-O-methyl modified nucleotide
  modified_base 66: mod_base = OTHER; note = 2'-O-methyl modified nucleotide
  modified_base 67: mod_base = OTHER; note = 2'-O-methyl modified nucleotide
  modified_base 68: mod_base = OTHER; note = 2'-O-methyl modified nucleotide
  modified_base 69: mod_base = OTHER; note = 2'-O-methyl modified nucleotide
  modified_base 70: mod_base = OTHER; note = 2'-O-methyl modified nucleotide
  modified_base 75: mod_base = OTHER; note = 2'-O-methyl modified nucleotide
  modified_base 77: mod_base = OTHER; note = 2'-O-methyl modified nucleotide
  modified_base 80: mod_base = OTHER; note = 2'-O-methyl modified nucleotide
  modified_base 86: mod_base = OTHER; note = 2'-O-methyl modified nucleotide
  modified_base 87: mod_base = OTHER; note = 2'-O-methyl modified nucleotide
  modified_base 89: mod_base = OTHER; note = 2'-O-methyl modified nucleotide
  modified_base 90: mod_base = OTHER; note = 2'-O-methyl modified nucleotide
  modified_base 91: mod_base = OTHER; note = 2'-O-methyl modified nucleotide
  modified_base 92: mod_base = OTHER; note = 2'-O-methyl modified nucleotide
  modified_base 99: mod_base = OTHER; note = nucleotide with phosphorothioate linkage
  modified_base 100: mod_base = OTHER; note = 2'-O-methyl modified nucleotide with phosphorothioate linkage
  modified_base 101: mod_base = OTHER; note = 2'-O-methyl modified nucleotide

SEQ ID NO: 709 - RNA, 102 nt, synthetic construct; identical to SEQ ID NO: 706
  source 1..102: mol_type = other RNA
  misc_difference 1: note = a, c, u, g, unknown or other
  misc_difference 2: note = a, c, u, g, unknown or other
  misc_difference 3: note = a, c, u, g, unknown or other
  misc_difference 4: note = a, c, u, g, unknown or other
  misc_difference 5: note = a, c, u, g, unknown or other
  misc_difference 6: note = a, c, u, g, unknown or other
  misc_difference 7: note = a, c, u, g, unknown or other
  misc_difference 8: note = a, c, u, g, unknown or other
  misc_difference 9: note = a, c, u, g, unknown or other
  misc_difference 10: note = a, c, u, g, unknown or other
  misc_difference 11: note = a, c, u, g, unknown or other
  misc_difference 12: note = a, c, u, g, unknown or other
  misc_difference 13: note = a, c, u, g, unknown or other
  misc_difference 14: note = a, c, u, g, unknown or other
  misc_difference 15: note = a, c, u, g, unknown or other
  misc_difference 16: note = a, c, u, g, unknown or other
  misc_difference 17: note = a, c, u, g, unknown or other
  misc_difference 18: note = a, c, u, g, unknown or other
  misc_difference 19: note = a, c, u, g, unknown or other
  misc_difference 20: note = a, c, u, g, unknown or other
  misc_difference 21: note = a, c, u, g, unknown or other
  misc_difference 22: note = a, c, u, g, unknown or other
  misc_difference 23: note = a, c, u, g, unknown or other
  misc_difference 24: note = a, c, u, g, unknown or other
  misc_difference 25: note = a, c, u, g, unknown or other
  modified_base 30: mod_base = OTHER; note = 2'-O-methyl modified nucleotide
  modified_base 31: mod_base = OTHER; note = 2'-O-methyl modified nucleotide
  modified_base 32: mod_base = OTHER; note = 2'-O-methyl modified nucleotide
  modified_base 33: mod_base = OTHER; note = 2'-O-methyl modified nucleotide
  modified_base 38: mod_base = OTHER; note = 2'-O-methyl modified nucleotide
  modified_base 39: mod_base = OTHER; note = 2'-O-methyl modified nucleotide
  modified_base 40: mod_base = OTHER; note = 2'-O-methyl modified nucleotide
  modified_base 41: mod_base = OTHER; note = 2'-O-methyl modified nucleotide
  modified_base 42: mod_base = OTHER; note = 2'-O-methyl modified nucleotide
  modified_base 43: mod_base = OTHER; note = 2'-O-methyl modified nucleotide
  modified_base 44: mod_base = OTHER; note = 2'-O-methyl modified nucleotide
  modified_base 48: mod_base = OTHER; note = 2'-O-methyl modified nucleotide
  modified_base 49: mod_base = OTHER; note = 2'-O-methyl modified nucleotide
  modified_base 52: mod_base = OTHER; note = 2'-O-methyl modified nucleotide
  modified_base 55: mod_base = OTHER; note = nucleotide with phosphorothioate linkage
  modified_base 59: mod_base = OTHER; note = 2'-O-methyl modified nucleotide
  modified_base 60: mod_base = OTHER; note = 2'-O-methyl modified nucleotide
  modified_base 62: mod_base = OTHER; note = 2'-O-methyl modified nucleotide
  modified_base 63: mod_base = OTHER; note = 2'-O-methyl modified nucleotide
  modified_base 64: mod_base = OTHER; note = 2'-O-methyl modified nucleotide
  modified_base 65: mod_base = OTHER; note = 2'-O-methyl modified nucleotide
  modified_base 66: mod_base = OTHER; note = 2'-O-methyl modified nucleotide
  modified_base 67: mod_base = OTHER; note = 2'-O-methyl modified nucleotide
  modified_base 68: mod_base = OTHER; note = 2'-O-methyl modified nucleotide
  modified_base 69: mod_base = OTHER; note = 2'-O-methyl modified nucleotide
  modified_base 70: mod_base = OTHER; note = 2'-O-methyl modified nucleotide
  modified_base 71: mod_base = OTHER; note = 2'-O-methyl modified nucleotide
  modified_base 76: mod_base = OTHER; note = 2'-O-methyl modified nucleotide
  modified_base 78: mod_base = OTHER; note = 2'-O-methyl modified nucleotide
  modified_base 81: mod_base = OTHER; note = 2'-O-methyl modified nucleotide
  modified_base 87: mod_base = OTHER; note = 2'-O-methyl modified nucleotide
  modified_base 88: mod_base = OTHER; note = 2'-O-methyl modified nucleotide
  modified_base 90: mod_base = OTHER; note = 2'-O-methyl modified nucleotide
  modified_base 91: mod_base = OTHER; note = 2'-O-methyl modified nucleotide
  modified_base 92: mod_base = OTHER; note = 2'-O-methyl modified nucleotide
  modified_base 93: mod_base = OTHER; note = 2'-O-methyl modified nucleotide
  modified_base 100: mod_base = OTHER; note = nucleotide with phosphorothioate linkage
  modified_base 101: mod_base = OTHER; note = 2'-O-methyl modified nucleotide with phosphorothioate linkage
  modified_base 102: mod_base = OTHER; note = 2'-O-methyl modified nucleotide
  misc_difference 1..25: note = This region may encompass 20-25 nucleotides

SEQ ID NO: 710 - RNA, 77 nt, synthetic construct; identical to SEQ ID NO: 701
  source 1..77: mol_type = other RNA
  modified_base 5: mod_base = OTHER; note = 2'-O-methyl modified nucleotide
  modified_base 6: mod_base = OTHER; note = 2'-O-methyl modified nucleotide
  modified_base 7: mod_base = OTHER; note = 2'-O-methyl modified nucleotide
  modified_base 8: mod_base = OTHER; note = 2'-O-methyl modified nucleotide
  modified_base 13: mod_base = OTHER; note = 2'-O-methyl modified nucleotide
  modified_base 14: mod_base = OTHER; note = 2'-O-methyl modified nucleotide
  modified_base 15: mod_base = OTHER; note = 2'-O-methyl modified nucleotide
  modified_base 16: mod_base = OTHER; note = 2'-O-methyl modified nucleotide
  modified_base 17: mod_base = OTHER; note = 2'-O-methyl modified nucleotide
  modified_base 18: mod_base = OTHER; note = 2'-O-methyl modified nucleotide
  modified_base 19: mod_base = OTHER; note = 2'-O-methyl modified nucleotide
  modified_base 23: mod_base = OTHER; note = 2'-O-methyl modified nucleotide
  modified_base 24: mod_base = OTHER; note = 2'-O-methyl modified nucleotide
  modified_base 27: mod_base = OTHER; note = 2'-O-methyl modified nucleotide
  modified_base 30: mod_base = OTHER; note = nucleotide with phosphorothioate linkage
  modified_base 34: mod_base = OTHER; note = 2'-O-methyl modified nucleotide
  modified_base 35: mod_base = OTHER; note = 2'-O-methyl modified nucleotide
  modified_base 37: mod_base = OTHER; note = 2'-O-methyl modified nucleotide
  modified_base 38: mod_base = OTHER; note = 2'-O-methyl modified nucleotide
  modified_base 39: mod_base = OTHER; note = 2'-O-methyl modified nucleotide
  modified_base 40: mod_base = OTHER; note = 2'-O-methyl modified nucleotide
  modified_base 41: mod_base = OTHER; note = 2'-O-methyl modified nucleotide
  modified_base 42: mod_base = OTHER; note = 2'-O-methyl modified nucleotide
  modified_base 43: mod_base = OTHER; note = 2'-O-methyl modified nucleotide
  modified_base 44: mod_base = OTHER; note = 2'-O-methyl modified nucleotide
  modified_base 45: mod_base = OTHER; note = 2'-O-methyl modified nucleotide
  modified_base 46: mod_base = OTHER; note = 2'-O-methyl modified nucleotide
  modified_base 51: mod_base = OTHER; note = 2'-O-methyl modified nucleotide
  modified_base 53: mod_base = OTHER; note = 2'-O-methyl modified nucleotide
  modified_base 56: mod_base = OTHER; note = 2'-O-methyl modified nucleotide
  modified_base 62: mod_base = OTHER; note = 2'-O-methyl modified nucleotide
  modified_base 63: mod_base = OTHER; note = 2'-O-methyl modified nucleotide
  modified_base 65: mod_base = OTHER; note = 2'-O-methyl modified nucleotide
  modified_base 66: mod_base = OTHER; note = 2'-O-methyl modified nucleotide
  modified_base 67: mod_base = OTHER; note = 2'-O-methyl modified nucleotide
  modified_base 68: mod_base = OTHER; note = 2'-O-methyl modified nucleotide
  modified_base 75: mod_base = OTHER; note = nucleotide with phosphorothioate linkage
  modified_base 76: mod_base = OTHER; note = 2'-O-methyl modified nucleotide with phosphorothioate linkage
  modified_base 77: mod_base = OTHER; note = 2'-O-methyl modified nucleotide

SEQ ID NO: 711 - RNA, 105 nt, synthetic construct
  source 1..105: mol_type = other RNA
  misc_difference 1: note = 2'-O-methyl modified adenosine, cytidine, guanosine, uridine, unknown or other nucleotide with phosphorothioate linkage
  misc_difference 2: note = 2'-O-methyl modified adenosine, cytidine, guanosine, uridine, unknown or other nucleotide with phosphorothioate linkage
  misc_difference 3: note = 2'-O-methyl modified adenosine, cytidine, guanosine, uridine, unknown or other nucleotide with phosphorothioate linkage
  misc_difference 4: note = 2'-O-methyl modified adenosine, cytidine, guanosine, uridine, unknown or other nucleotide
  misc_difference 5: note = 2'-O-methyl modified adenosine, cytidine, guanosine, uridine, unknown or other nucleotide
  misc_difference 6: note = a, c, u, g, unknown or other
  misc_difference 7: note = a, c, u, g, unknown or other
  misc_difference 8: note = 2'-O-methyl modified adenosine, cytidine, guanosine, uridine, unknown or other nucleotide
  misc_difference 9: note = 2'-O-methyl modified adenosine, cytidine, guanosine, uridine, unknown or other nucleotide
  misc_difference 10: note = a, c, u, g, unknown or other
  misc_difference 11: note = 2'-O-methyl modified adenosine, cytidine, guanosine, uridine, unknown or other nucleotide
  misc_difference 12: note = a, c, u, g, unknown or other
  misc_difference 13: note = 2'-O-methyl modified adenosine, cytidine, guanosine, uridine, unknown or other nucleotide
  misc_difference 14: note = a, c, u, g, unknown or other
  misc_difference 15: note = a, c, u, g, unknown or other
  misc_difference 16: note = a, c, u, g, unknown or other
  misc_difference 17: note = a, c, u, g, unknown or other
  misc_difference 18: note = 2'-O-methyl modified adenosine, cytidine, guanosine, uridine, unknown or other nucleotide
  misc_difference 19: note = a, c, u, g, unknown or other
  misc_difference 20: note = a, c, u, g, unknown or other
  misc_difference 21: note = a, c, u, g, unknown or other
  misc_difference 22: note = 2'-O-methyl modified adenosine, cytidine, guanosine, uridine, unknown or other nucleotide
  misc_difference 23: note = a, c, u, g, unknown or other
  misc_difference 24: note = a, c, u, g, unknown or other
  modified_base 25: mod_base = OTHER; note = 2'-O-methyl modified nucleotide
  modified_base 29: mod_base = OTHER; note = 2'-O-methyl modified nucleotide
  modified_base 30: mod_base = OTHER; note = 2'-O-methyl modified nucleotide
  modified_base 31: mod_base = OTHER; note = 2'-O-methyl modified nucleotide
  modified_base 32: mod_base = OTHER; note = 2'-O-methyl modified nucleotide
  modified_base 37: mod_base = OTHER; note = 2'-O-methyl modified nucleotide
  modified_base 38: mod_base = OTHER; note = 2'-O-methyl modified nucleotide
  modified_base 39: mod_base = OTHER; note = 2'-O-methyl modified nucleotide
  modified_base 40: mod_base = OTHER; note = 2'-O-methyl modified nucleotide
  modified_base 41: mod_base = OTHER; note = 2'-O-methyl modified nucleotide
  modified_base 42: mod_base = OTHER; note = 2'-O-methyl modified nucleotide
  modified_base 43: mod_base = OTHER; note = 2'-O-methyl modified nucleotide
  modified_base 44: mod_base = OTHER; note = 2'-O-methyl modified nucleotide
  modified_base 45: mod_base = OTHER; note = 2'-O-methyl modified nucleotide
  modified_base 46: mod_base = OTHER; note = 2'-O-methyl modified nucleotide
  modified_base 47: mod_base = OTHER; note = 2'-O-methyl modified nucleotide
  modified_base 51: mod_base = OTHER; note = 2'-O-methyl modified nucleotide
  modified_base 52: mod_base = OTHER; note = 2'-O-methyl modified nucleotide
  modified_base 55: mod_base = OTHER; note = 2'-O-methyl modified nucleotide
  modified_base 58: mod_base = OTHER; note = nucleotide with phosphorothioate linkage
  modified_base 62: mod_base = OTHER; note = 2'-O-methyl modified nucleotide
  modified_base 63: mod_base = OTHER; note = 2'-O-methyl modified nucleotide
  modified_base 65: mod_base = OTHER; note = 2'-O-methyl modified nucleotide
  modified_base 66: mod_base = OTHER; note = 2'-O-methyl modified nucleotide
  modified_base 67: mod_base = OTHER; note = 2'-O-methyl modified nucleotide
  modified_base 68: mod_base = OTHER; note = 2'-O-methyl modified nucleotide
  modified_base 69: mod_base = OTHER; note = 2'-O-methyl modified nucleotide
  modified_base 70: mod_base = OTHER; note = 2'-O-methyl modified nucleotide
  modified_base 71: mod_base = OTHER; note = 2'-O-methyl modified nucleotide
  modified_base 72: mod_base = OTHER; note = 2'-O-methyl modified nucleotide
  modified_base 73: mod_base = OTHER; note = 2'-O-methyl modified nucleotide
  modified_base 74: mod_base = OTHER; note = 2'-O-methyl modified nucleotide
  modified_base 79: mod_base = OTHER; note = 2'-O-methyl modified nucleotide
  modified_base 81: mod_base = OTHER; note = 2'-O-methyl modified nucleotide
  modified_base 84: mod_base = OTHER; note = 2'-O-methyl modified nucleotide
  modified_base 90: mod_base = OTHER; note = 2'-O-methyl modified nucleotide
  modified_base 91: mod_base = OTHER; note = 2'-O-methyl modified nucleotide
  modified_base 93: mod_base = OTHER; note = 2'-O-methyl modified nucleotide
  modified_base 94: mod_base = OTHER; note = 2'-O-methyl modified nucleotide
  modified_base 95: mod_base = OTHER; note = 2'-O-methyl modified nucleotide
  modified_base 96: mod_base = OTHER; note = 2'-O-methyl modified nucleotide
  modified_base 103: mod_base = OTHER; note = nucleotide with phosphorothioate linkage
  modified_base 104: mod_base = OTHER; note = 2'-O-methyl modified nucleotide with phosphorothioate linkage
  modified_base 105: mod_base = OTHER; note = 2'-O-methyl modified nucleotide
nnnnnnnnnnnnnnnnnnnnnnnngttgtagctcccttcgaaagaccgttgctacaataaggccgtcgaaagatgtgccgcaacgctctgccttctggcatcgtt

SEQ ID NO: 712 - RNA, 101 nt, synthetic construct; identical to SEQ ID NO: 705
  source 1..101: mol_type = other RNA
  misc_difference 1: note = 2'-O-methyl modified adenosine, cytidine, guanosine, uridine, unknown or other nucleotide with phosphorothioate linkage
  misc_difference 2: note = 2'-O-methyl modified adenosine, cytidine, guanosine, uridine, unknown or other nucleotide with phosphorothioate linkage
  misc_difference 3: note = 2'-O-methyl modified adenosine, cytidine, guanosine, uridine, unknown or other nucleotide with phosphorothioate linkage
  misc_difference 4: note = 2'-O-methyl modified adenosine, cytidine, guanosine, uridine, unknown or other nucleotide
  misc_difference 5: note = 2'-O-methyl modified adenosine, cytidine, guanosine, uridine, unknown or other nucleotide
  misc_difference 6: note = a, c, u, g, unknown or other
  misc_difference 7: note = a, c, u, g, unknown or other
  misc_difference 8: note = 2'-O-methyl modified adenosine, cytidine, guanosine, uridine, unknown or other nucleotide
  misc_difference 9: note = 2'-O-methyl modified adenosine, cytidine, guanosine, uridine, unknown or other nucleotide
  misc_difference 10: note = a, c, u, g, unknown or other
  misc_difference 11: note = 2'-O-methyl modified adenosine, cytidine, guanosine, uridine, unknown or other nucleotide
  misc_difference 12: note = a, c, u, g, unknown or other
  misc_difference 13: note = 2'-O-methyl modified adenosine, cytidine, guanosine, uridine, unknown or other nucleotide
  misc_difference 14: note = a, c, u, g, unknown or other
  misc_difference 15: note = a, c, u, g, unknown or other
  misc_difference 16: note = a, c, u, g, unknown or other
  misc_difference 17: note = a, c, u, g, unknown or other
  misc_difference 18: note = 2'-O-methyl modified adenosine, cytidine, guanosine, uridine, unknown or other nucleotide
  misc_difference 19: note = a, c, u, g, unknown or other
  misc_difference 20: note = a, c, u, g, unknown or other
  misc_difference 21: note = a, c, u, g, unknown or other
  misc_difference 22: note = 2'-O-methyl modified adenosine, cytidine, guanosine, uridine, unknown or other nucleotide
  misc_difference 23: note = a, c, u, g, unknown or other
  misc_difference 24: note = a, c, u, g, unknown or other
  modified_base 25: mod_base = OTHER; note = 2'-O-methyl modified nucleotide
  modified_base 29: mod_base = OTHER; note = 2'-O-methyl modified nucleotide
  modified_base 30: mod_base = OTHER; note = 2'-O-methyl modified nucleotide
  modified_base 31: mod_base = OTHER; note = 2'-O-methyl modified nucleotide
  modified_base 32: mod_base = OTHER; note = 2'-O-methyl modified nucleotide
  modified_base 37: mod_base = OTHER; note = 2'-O-methyl modified nucleotide
  modified_base 38: mod_base = OTHER; note = 2'-O-methyl modified nucleotide
  modified_base 39: mod_base = OTHER; note = 2'-O-methyl modified nucleotide
  modified_base 40: mod_base = OTHER; note = 2'-O-methyl modified nucleotide
  modified_base 41: mod_base = OTHER; note = 2'-O-methyl modified nucleotide
  modified_base 42: mod_base = OTHER; note = 2'-O-methyl modified nucleotide
  modified_base 43: mod_base = OTHER; note = 2'-O-methyl modified nucleotide
  modified_base 47: mod_base = OTHER; note = 2'-O-methyl modified nucleotide
  modified_base 48: mod_base = OTHER; note = 2'-O-methyl modified nucleotide
  modified_base 51: mod_base = OTHER; note = 2'-O-methyl modified nucleotide
  modified_base 58: mod_base = OTHER; note = 2'-O-methyl modified nucleotide
  modified_base 59: mod_base = OTHER; note = 2'-O-methyl modified nucleotide
  modified_base 61: mod_base = OTHER; note = 2'-O-methyl modified nucleotide
  modified_base 62: mod_base = OTHER; note = 2'-O-methyl modified nucleotide
  modified_base 63: mod_base = OTHER; note = 2'-O-methyl modified nucleotide
  modified_base 64: mod_base = OTHER; note = 2'-O-methyl modified nucleotide
  modified_base 65: mod_base = OTHER; note = 2'-O-methyl modified nucleotide
  modified_base 66: mod_base = OTHER; note = 2'-O-methyl modified nucleotide
  modified_base 67: mod_base = OTHER; note = 2'-O-methyl modified nucleotide
  modified_base 68: mod_base = OTHER; note = 2'-O-methyl modified nucleotide
  modified_base 69: mod_base = OTHER; note = 2'-O-methyl modified nucleotide
  modified_base 70: mod_base = OTHER; note = 2'-O-methyl modified nucleotide
  modified_base 75: mod_base = OTHER; note = 2'-O-methyl modified nucleotide
  modified_base 77: mod_base = OTHER; note = 2'-O-methyl modified nucleotide
  modified_base 80: mod_base = OTHER; note = 2'-O-methyl modified nucleotide
  modified_base 86: mod_base = OTHER; note = 2'-O-methyl modified nucleotide
  modified_base 87: mod_base = OTHER; note = 2'-O-methyl modified nucleotide
  modified_base 89: mod_base = OTHER; note = 2'-O-methyl modified nucleotide
  modified_base 90: mod_base = OTHER; note = 2'-O-methyl modified nucleotide
  modified_base 91: mod_base = OTHER; note = 2'-O-methyl modified nucleotide
  modified_base 92: mod_base = OTHER; note = 2'-O-methyl modified nucleotide
  modified_base 99: mod_base = OTHER; note = nucleotide with phosphorothioate linkage
  modified_base 100: mod_base = OTHER; note = 2'-O-methyl modified nucleotide with phosphorothioate linkage
  modified_base 101: mod_base = OTHER; note = 2'-O-methyl modified nucleotide

SEQ ID NO: 713 - RNA, 101 nt, synthetic construct; identical to SEQ ID NO: 705
  source 1..101: mol_type = other RNA
  misc_difference 1: note = 2'-O-methyl modified adenosine, cytidine, guanosine, uridine, unknown or other nucleotide with phosphorothioate linkage
  misc_difference 2: note = 2'-O-methyl modified adenosine, cytidine, guanosine, uridine, unknown or other nucleotide with phosphorothioate linkage
  misc_difference 3: note = 2'-O-methyl modified adenosine, cytidine, guanosine, uridine, unknown or other nucleotide with phosphorothioate linkage
  misc_difference 4: note = 2'-O-methyl modified adenosine, cytidine, guanosine, uridine, unknown or other nucleotide
  misc_difference 5: note = 2'-O-methyl modified adenosine, cytidine, guanosine, uridine, unknown or other nucleotide
  misc_difference 6: note = a, c, u, g, unknown or other
  misc_difference 7: note = a, c, u, g, unknown or other
  misc_difference 8: note = 2'-O-methyl modified adenosine, cytidine, guanosine, uridine, unknown or other nucleotide
  misc_difference 9: note = 2'-O-methyl modified adenosine, cytidine, guanosine, uridine, unknown or other nucleotide
  misc_difference 10: note = a, c, u, g, unknown or other
  misc_difference 11: note = 2'-O-methyl modified adenosine, cytidine, guanosine, uridine, unknown or other nucleotide
  misc_difference 12: note = a, c, u, g, unknown or other
  misc_difference 13: note = 2'-O-methyl modified adenosine, cytidine, guanosine, uridine, unknown or other nucleotide
  misc_difference 14: note = a, c, u, g, unknown or other
  misc_difference 15: note = a, c, u, g, unknown or other
  misc_difference 16: note = a, c, u, g, unknown or other
  misc_difference 17: note = a, c, u, g, unknown or other
  misc_difference 18: note = 2'-O-methyl modified adenosine, cytidine, guanosine, uridine, unknown or other nucleotide
  misc_difference 19: note = a, c, u, g, unknown or other
  misc_difference 20: note = a, c, u, g, unknown or other
  misc_difference 21: note = a, c, u, g, unknown or other
  misc_difference 22: note = 2'-O-methyl modified adenosine, cytidine, guanosine, uridine, unknown or other nucleotide
  misc_difference 23: note = a, c, u, g, unknown or other
  misc_difference 24: note = a, c, u, g, unknown or other
  modified_base 25: mod_base = OTHER; note = 2'-O-methyl modified nucleotide
  modified_base 29: mod_base = OTHER; note = 2'-O-methyl modified nucleotide
  modified_base 30: mod_base = OTHER; note = 2'-O-methyl modified nucleotide
  modified_base 31: mod_base = OTHER; note = 2'-O-methyl modified nucleotide
  modified_base 32: mod_base = OTHER; note = 2'-O-methyl modified nucleotide
  modified_base 37: mod_base = OTHER; note = 2'-O-methyl modified nucleotide
  modified_base 38: mod_base = OTHER; note = 2'-O-methyl modified nucleotide
  modified_base 39: mod_base = OTHER; note = 2'-O-methyl modified nucleotide
  modified_base 40: mod_base = OTHER; note = 2'-O-methyl modified nucleotide
  modified_base 41: mod_base = OTHER; note = 2'-O-methyl modified nucleotide
  modified_base 42: mod_base = OTHER; note = 2'-O-methyl modified nucleotide
  modified_base 43: mod_base = OTHER; note = 2'-O-methyl modified nucleotide
  modified_base 47: mod_base = OTHER; note = 2'-O-methyl modified nucleotide
  modified_base 48: mod_base = OTHER; note = 2'-O-methyl modified nucleotide
  modified_base 51: mod_base = OTHER; note = 2'-O-methyl modified nucleotide
  modified_base 54: mod_base = OTHER; note = nucleotide with phosphorothioate linkage
  modified_base 58: mod_base = OTHER; note = 2'-O-methyl modified nucleotide
  modified_base 59: mod_base = OTHER; note = 2'-O-methyl modified nucleotide
  modified_base 61: mod_base = OTHER; note = 2'-O-methyl modified nucleotide
  modified_base 62: mod_base = OTHER; note = 2'-O-methyl modified nucleotide
  modified_base 63: mod_base = OTHER; note = 2'-O-methyl modified nucleotide
  modified_base 64: mod_base = OTHER; note = 2'-O-methyl modified nucleotide
  modified_base 65: mod_base = OTHER; note = 2'-O-methyl modified nucleotide
  modified_base 66: mod_base = OTHER; note = 2'-O-methyl modified nucleotide
  modified_base 67: mod_base = OTHER; note = 2'-O-methyl modified nucleotide
  modified_base 68: mod_base = OTHER; note = 2'-O-methyl modified nucleotide
  modified_base 69: mod_base = OTHER; note = 2'-O-methyl modified nucleotide
  modified_base 70: mod_base = OTHER; note = 2'-O-methyl modified nucleotide
  modified_base 75: mod_base = OTHER; note = 2'-O-methyl modified nucleotide
  modified_base 77: mod_base = OTHER; note = 2'-O-methyl modified nucleotide
  modified_base 80: mod_base = OTHER; note = 2'-O-methyl modified nucleotide
  modified_base 82: mod_base = OTHER; note = 2'-O-methyl modified nucleotide
  modified_base 83: mod_base = OTHER; note = 2'-O-methyl modified nucleotide
  modified_base 84: mod_base = OTHER; note = 2'-O-methyl modified nucleotide
  modified_base 85: mod_base = OTHER; note = 2'-O-methyl modified nucleotide
  modified_base 86: mod_base = OTHER; note = 2'-O-methyl modified nucleotide
  modified_base 87: mod_base = OTHER; note = 2'-O-methyl modified nucleotide
  modified_base 89: mod_base = OTHER; note = 2'-O-methyl modified nucleotide
  modified_base 90: mod_base = OTHER; note = 2'-O-methyl modified nucleotide
  modified_base 91: mod_base = OTHER; note = 2'-O-methyl modified nucleotide
  modified_base 92: mod_base = OTHER; note = 2'-O-methyl modified nucleotide
  modified_base 99: mod_base = OTHER; note = nucleotide with phosphorothioate linkage
  modified_base 100: mod_base = OTHER; note = 2'-O-methyl modified nucleotide with phosphorothioate linkage
  modified_base 101: mod_base = OTHER; note = 2'-O-methyl modified nucleotide

SEQ ID NO: 714 - RNA, 101 nt, synthetic construct; identical to SEQ ID NO: 705
  source 1..101: mol_type = other RNA
  misc_difference 1: note = 2'-O-methyl modified adenosine, cytidine, guanosine, uridine, unknown or other nucleotide with phosphorothioate linkage
  misc_difference 2: note = 2'-O-methyl modified adenosine, cytidine, guanosine, uridine, unknown or other nucleotide with phosphorothioate linkage
  misc_difference 3: note = 2'-O-methyl modified adenosine, cytidine, guanosine, uridine, unknown or other nucleotide with phosphorothioate linkage
  misc_difference 4: note = 2'-O-methyl modified adenosine, cytidine, guanosine, uridine, unknown or other nucleotide
  misc_difference 5: note = 2'-O-methyl modified adenosine, cytidine, guanosine, uridine, unknown or other nucleotide
  misc_difference 6: note = a, c, u, g, unknown or other
  misc_difference 7: note = a, c, u, g, unknown or other
  misc_difference 8: note = 2'-O-methyl modified adenosine, cytidine, guanosine, uridine, unknown or other nucleotide
  misc_difference 9: note = 2'-O-methyl modified adenosine, cytidine, guanosine, uridine, unknown or other nucleotide
  misc_difference 10: note = a, c, u, g, unknown or other
  misc_difference 11: note = 2'-O-methyl modified adenosine, cytidine, guanosine, uridine, unknown or other nucleotide
  misc_difference 12: note = a, c, u, g, unknown or other
  misc_difference 13: note = 2'-O-methyl modified adenosine, cytidine, guanosine, uridine, unknown or other nucleotide
  misc_difference 14: note = a, c, u, g, unknown or other
  misc_difference 15: note = a, c, u, g, unknown or other
  misc_difference 16: note = a, c, u, g, unknown or other
  misc_difference 17: note = a, c, u, g, unknown or other
  misc_difference 18: note = 2'-O-methyl modified adenosine, cytidine, guanosine, uridine, unknown or other nucleotide
  misc_difference 19: note = a, c, u, g, unknown or other
  misc_difference 20: note = a, c, u, g, unknown or other
  misc_difference 21: note = a, c, u, g, unknown or other
  misc_difference 22: note = 2'-O-methyl modified adenosine, cytidine, guanosine, uridine, unknown or other nucleotide
  misc_difference 23: note = a, c, u, g, unknown or other
  misc_difference 24: note = a, c, u, g, unknown or other
  modified_base 25: mod_base = OTHER; note = 2'-O-methyl modified nucleotide
  modified_base 29: mod_base = OTHER; note = 2'-O-methyl modified nucleotide
  modified_base 30: mod_base = OTHER; note = 2'-O-methyl modified nucleotide
  modified_base 31: mod_base = OTHER; note = 2'-O-methyl modified nucleotide
  modified_base 32: mod_base = OTHER; note = 2'-O-methyl modified nucleotide
  modified_base 37: mod_base = OTHER; note = 2'-O-methyl modified nucleotide
  modified_base 38: mod_base = OTHER; note = 2'-O-methyl modified nucleotide
  modified_base 39: mod_base = OTHER; note = 2'-O-methyl modified nucleotide
  modified_base 40: mod_base = OTHER; note = 2'-O-methyl modified nucleotide
  modified_base 41: mod_base = OTHER; note = 2'-O-methyl modified nucleotide
  modified_base 42: mod_base = OTHER; note = 2'-O-methyl modified nucleotide
  modified_base 43: mod_base = OTHER; note = 2'-O-methyl modified nucleotide
  modified_base 47: mod_base = OTHER; note = 2'-O-methyl modified nucleotide
  modified_base 48: mod_base = OTHER; note = 2'-O-methyl modified nucleotide
  modified_base 51: mod_base = OTHER; note = 2'-O-methyl modified nucleotide
  modified_base 58: mod_base = OTHER; note = 2'-O-methyl modified nucleotide
  modified_base 59: mod_base = OTHER; note = 2'-O-methyl modified nucleotide
  modified_base 61: mod_base = OTHER; note = 2'-O-methyl modified nucleotide
  modified_base 62: mod_base = OTHER; note = 2'-O-methyl modified nucleotide
  modified_base 63: mod_base = OTHER; note = 2'-O-methyl modified nucleotide
  modified_base 64: mod_base = OTHER; note = 2'-O-methyl modified nucleotide
  modified_base 65: mod_base = OTHER; note = 2'-O-methyl modified nucleotide
  modified_base 66: mod_base = OTHER; note = 2'-O-methyl modified nucleotide
  modified_base 67: mod_base = OTHER; note = 2'-O-methyl modified nucleotide
  modified_base 68: mod_base = OTHER; note = 2'-O-methyl modified nucleotide
  modified_base 69: mod_base = OTHER; note = 2'-O-methyl modified nucleotide
  modified_base 70: mod_base = OTHER; note = 2'-O-methyl modified nucleotide
  modified_base 75: mod_base = OTHER; note = 2'-O-methyl modified nucleotide
  modified_base 77: mod_base = OTHER; note = 2'-O-methyl modified nucleotide
  modified_base 80: mod_base = OTHER; note = 2'-O-methyl modified nucleotide
  modified_base 82: mod_base = OTHER; note = 2'-O-methyl modified nucleotide
  modified_base 83: mod_base = OTHER; note = 2'-O-methyl modified nucleotide
  modified_base 84: mod_base = OTHER; note = 2'-O-methyl modified nucleotide
  modified_base 85: mod_base = OTHER; note = 2'-O-methyl modified nucleotide
  modified_base 86: mod_base = OTHER; note = 2'-O-methyl modified nucleotide
  modified_base 87: mod_base = OTHER; note = 2'-O-methyl modified nucleotide
  modified_base 89: mod_base = OTHER; note = 2'-O-methyl modified nucleotide
  modified_base 90: mod_base = OTHER; note = 2'-O-methyl modified nucleotide
  modified_base 91: mod_base = OTHER; note = 2'-O-methyl modified nucleotide
  modified_base 92: mod_base = OTHER; note = 2'-O-methyl modified nucleotide
  modified_base 99: mod_base = OTHER; note = nucleotide with phosphorothioate linkage
  modified_base 100: mod_base = OTHER; note = 2'-O-methyl modified nucleotide with phosphorothioate linkage
  modified_base 101: mod_base = OTHER; note = 2'-O-methyl modified nucleotide

SEQ ID NO: 715 - RNA, 77 nt, synthetic construct; identical to SEQ ID NO: 701
  source 1..77: mol_type = other RNA
  modified_base 1: mod_base = OTHER; note = 2'-O-methyl modified nucleotide
  modified_base 5: mod_base = OTHER; note = 2'-O-methyl modified nucleotide
  modified_base 6: mod_base = OTHER; note = 2'-O-methyl modified nucleotide
  modified_base 7: mod_base = OTHER; note = 2'-O-methyl modified nucleotide
  modified_base 8: mod_base = OTHER; note = 2'-O-methyl modified nucleotide
  modified_base 13: mod_base = OTHER; note = 2'-O-methyl modified nucleotide
  modified_base 14: mod_base = OTHER; note = 2'-O-methyl modified nucleotide
  modified_base 15: mod_base = OTHER; note = 2'-O-methyl modified nucleotide
  modified_base 16: mod_base = OTHER; note = 2'-O-methyl modified nucleotide
  modified_base 17: mod_base = OTHER; note = 2'-O-methyl modified nucleotide
  modified_base 18: mod_base = OTHER; note = 2'-O-methyl modified nucleotide
  modified_base 19: mod_base = OTHER; note = 2'-O-methyl modified nucleotide
  modified_base 23: mod_base = OTHER; note = 2'-O-methyl modified nucleotide
  modified_base 24: mod_base = OTHER; note = 2'-O-methyl modified nucleotide
  modified_base 27: mod_base = OTHER; note = 2'-O-methyl modified nucleotide
  modified_base 30: mod_base = OTHER; note = nucleotide with phosphorothioate linkage
  modified_base 34: mod_base = OTHER; note = 2'-O-methyl modified nucleotide
  modified_base 35: mod_base = OTHER; note = 2'-O-methyl modified nucleotide
  modified_base 37: mod_base = OTHER; note = 2'-O-methyl modified nucleotide
  modified_base 38: mod_base = OTHER; note = 2'-O-methyl modified nucleotide
  modified_base 39: mod_base = OTHER; note = 2'-O-methyl modified nucleotide
  modified_base 40: mod_base = OTHER; note = 2'-O-methyl modified nucleotide
  modified_base 41: mod_base = OTHER; note = 2'-O-methyl modified nucleotide
  modified_base 42: mod_base = OTHER; note = 2'-O-methyl modified nucleotide
  modified_base 43: mod_base = OTHER; note = 2'-O-methyl modified nucleotide
  modified_base 44: mod_base = OTHER; note = 2'-O-methyl modified nucleotide
  modified_base 45: mod_base = OTHER; note = 2'-O-methyl modified nucleotide
  modified_base 46: mod_base = OTHER; note = 2'-O-methyl modified nucleotide
  modified_base 51: mod_base = OTHER; note = 2'-O-methyl modified nucleotide
  modified_base 54: mod_base = OTHER; note = 2'-O-methyl modified nucleotide
  modified_base 55: mod_base = OTHER; note = 2'-O-methyl modified nucleotide
  modified_base 56: mod_base = OTHER; note = 2'-O-methyl modified nucleotide
  modified_base 57: mod_base = OTHER; note = 2'-O-methyl modified nucleotide
  modified_base 62: mod_base = OTHER; note = 2'-O-methyl modified nucleotide
  modified_base 63: mod_base = OTHER; note = 2'-O-methyl modified nucleotide
  modified_base 65: mod_base = OTHER; note = 2'-O-methyl modified nucleotide
  modified_base 66: mod_base = OTHER; note = 2'-O-methyl modified nucleotide
  modified_base 67: mod_base = OTHER; note = 2'-O-methyl modified nucleotide
  modified_base 68: mod_base = OTHER; note = 2'-O-methyl modified nucleotide
  modified_base 70: mod_base = OTHER; note = 2'-O-methyl modified nucleotide
  modified_base 72: mod_base = OTHER; note = 2'-O-methyl modified nucleotide
  modified_base 73: mod_base = OTHER; note = 2'-O-methyl modified nucleotide
  modified_base 74: mod_base = OTHER; note = nucleotide with phosphorothioate linkage
  modified_base 75: mod_base = OTHER; note = 2'-O-methyl modified nucleotide with phosphorothioate linkage
  modified_base 76: mod_base = OTHER; note = 2'-O-methyl modified nucleotide with phosphorothioate linkage
  modified_base 77: mod_base = OTHER; note = 2'-O-methyl modified nucleotide

SEQ ID NO: 716 - RNA, 77 nt, synthetic construct; identical to SEQ ID NO: 701
  source 1..77: mol_type = other RNA
  modified_base 1: mod_base = OTHER; note = 2'-O-methyl modified nucleotide
  modified_base 5: mod_base = OTHER; note = 2'-O-methyl modified nucleotide
  modified_base 6: mod_base = OTHER; note = 2'-O-methyl modified nucleotide
  modified_base 7: mod_base = OTHER; note = 2'-O-methyl modified nucleotide
  modified_base 8: mod_base = OTHER; note = 2'-O-methyl modified nucleotide
  modified_base 13: mod_base = OTHER; note = 2'-O-methyl modified nucleotide
  modified_base 14: mod_base = OTHER; note = 2'-O-methyl modified nucleotide
  modified_base 15: mod_base = OTHER; note = 2'-O-methyl modified nucleotide
  modified_base 16: mod_base = OTHER; note = 2'-O-methyl modified nucleotide
  modified_base 17: mod_base = OTHER; note = 2'-O-methyl modified nucleotide
  modified_base 18: mod_base = OTHER; note = 2'-O-methyl modified nucleotide
  modified_base 19: mod_base = OTHER; note = 2'-O-methyl modified nucleotide
  modified_base 23: mod_base = OTHER; note = 2'-O-methyl modified nucleotide
  modified_base 24: mod_base = OTHER; note = 2'-O-methyl modified nucleotide
  modified_base 27: mod_base = OTHER; note = 2'-O-methyl modified nucleotide
  modified_base 30: mod_base = OTHER; note = nucleotide with phosphorothioate linkage
  modified_base 34: mod_base = OTHER; note = 2'-O-methyl modified nucleotide
  modified_base 35: mod_base = OTHER; note = 2'-O-methyl modified nucleotide
  modified_base 37: mod_base = OTHER; note = 2'-O-methyl modified nucleotide
  modified_base 38: mod_base = OTHER; note = 2'-O-methyl modified nucleotide
  modified_base 39: mod_base = OTHER; note = 2'-O-methyl modified nucleotide
  modified_base 40: mod_base = OTHER; note = 2'-O-methyl modified nucleotide
  modified_base 41: mod_base = OTHER; note = 2'-O-methyl modified nucleotide
  modified_base 42: mod_base = OTHER; note = 2'-O-methyl modified nucleotide
  modified_base 43: mod_base = OTHER; note = 2'-O-methyl modified nucleotide
  modified_base 44: mod_base = OTHER; note = 2'-O-methyl modified nucleotide
  modified_base 45: mod_base = OTHER; note = 2'-O-methyl modified nucleotide
  modified_base 46: mod_base = OTHER; note = 2'-O-methyl modified nucleotide
  modified_base 51: mod_base = OTHER; note = 2'-O-methyl modified nucleotide
  modified_base 53: mod_base = OTHER; note = 2'-O-methyl modified nucleotide
  modified_base 56: mod_base = OTHER; note = 2'-O-methyl modified nucleotide
  modified_base 62: mod_base = OTHER; note = 2'-O-methyl modified nucleotide
  modified_base 63: mod_base = OTHER; note = 2'-O-methyl modified nucleotide
  modified_base 65: mod_base = OTHER; note = 2'-O-methyl modified nucleotide
  modified_base 66: mod_base = OTHER; note = 2'-O-methyl modified nucleotide
  modified_base 67: mod_base = OTHER; note = 2'-O-methyl modified nucleotide
  modified_base 68: mod_base = OTHER; note = 2'-O-methyl modified nucleotide
  modified_base 75: mod_base = OTHER; note = nucleotide with phosphorothioate linkage
  modified_base 76: mod_base = OTHER; note = 2'-O-methyl modified nucleotide with phosphorothioate linkage
  modified_base 77: mod_base = OTHER; note = 2'-O-methyl modified nucleotide

SEQ ID NO: 717 - RNA, 77 nt, synthetic construct; identical to SEQ ID NO: 701
  source 1..77: mol_type = other RNA
  modified_base 1: mod_base = OTHER; note = 2'-O-methyl modified nucleotide
  modified_base 5: mod_base = OTHER; note = 2'-O-methyl modified nucleotide
  modified_base 6: mod_base = OTHER; note = 2'-O-methyl modified nucleotide
  modified_base 7: mod_base = OTHER; note = 2'-O-methyl modified nucleotide
  modified_base 8: mod_base = OTHER; note = 2'-O-methyl modified nucleotide
  modified_base 13: mod_base = OTHER; note = 2'-O-methyl modified nucleotide
  modified_base 14: mod_base = OTHER; note = 2'-O-methyl modified nucleotide
  modified_base 15: mod_base = OTHER; note = 2'-O-methyl modified nucleotide
  modified_base 16: mod_base = OTHER; note = 2'-O-methyl modified nucleotide
  modified_base 17: mod_base = OTHER; note = 2'-O-methyl modified nucleotide
  modified_base 18: mod_base = OTHER; note = 2'-O-methyl modified nucleotide
  modified_base 19: mod_base = OTHER; note = 2'-O-methyl modified nucleotide
  modified_base 23: mod_base = OTHER; note = 2'-O-methyl modified nucleotide
  modified_base 24: mod_base = OTHER; note = 2'-O-methyl modified nucleotide
  modified_base 27: mod_base = OTHER; note = 2'-O-methyl modified nucleotide
  modified_base 34: mod_base = OTHER; note = 2'-O-methyl modified nucleotide
  modified_base 35: mod_base = OTHER; note = 2'-O-methyl modified nucleotide
  modified_base 37: mod_base = OTHER; note = 2'-O-methyl modified nucleotide
  modified_base 38: mod_base = OTHER; note = 2'-O-methyl modified nucleotide
  modified_base 39: mod_base = OTHER; note = 2'-O-methyl modified nucleotide
  modified_base 40: mod_base = OTHER; note = 2'-O-methyl modified nucleotide
  modified_base 41: mod_base = OTHER; note = 2'-O-methyl modified nucleotide
  modified_base 42: mod_base = OTHER; note = 2'-O-methyl modified nucleotide
  modified_base 43: mod_base = OTHER; note = 2'-O-methyl modified nucleotide
  modified_base 44: mod_base = OTHER; note = 2'-O-methyl modified nucleotide
  modified_base 45: mod_base = OTHER; note = 2'-O-methyl modified nucleotide
  modified_base 46: mod_base = OTHER; note = 2'-O-methyl modified nucleotide
  modified_base 51: mod_base = OTHER; note = 2'-O-methyl modified nucleotide
  modified_base 53: mod_base = OTHER; note = 2'-O-methyl modified nucleotide
  modified_base 56: mod_base = OTHER; note = 2'-O-methyl modified nucleotide
  modified_base 62: mod_base = OTHER; note = 2'-O-methyl modified nucleotide
  modified_base 63: mod_base = OTHER; note = 2'-O-methyl modified nucleotide
  modified_base 65: mod_base = OTHER; note = 2'-O-methyl modified nucleotide
  modified_base 66: mod_base = OTHER; note = 2'-O-methyl modified nucleotide
  modified_base 67: mod_base = OTHER; note = 2'-O-methyl modified nucleotide
  modified_base 68: mod_base = OTHER; note = 2'-O-methyl modified nucleotide
  modified_base 75: mod_base = OTHER; note = nucleotide with phosphorothioate linkage
  modified_base 76: mod_base = OTHER; note = 2'-O-methyl modified nucleotide with phosphorothioate linkage
  modified_base 77: mod_base = OTHER; note = 2'-O-methyl modified nucleotide

SEQ ID NO: 718 - RNA, 77 nt, synthetic construct; identical to SEQ ID NO: 701
  source 1..77: mol_type = other RNA
  modified_base 1: mod_base = OTHER; note = 2'-O-methyl modified nucleotide
  modified_base 5: mod_base = OTHER; note = 2'-O-methyl modified nucleotide
  modified_base 6: mod_base = OTHER; note = 2'-O-methyl modified nucleotide
  modified_base 7: mod_base = OTHER; note = 2'-O-methyl modified nucleotide
  modified_base 8: mod_base = OTHER; note = 2'-O-methyl modified nucleotide
  modified_base 13: mod_base = OTHER; note = 2'-O-methyl modified nucleotide
  modified_base 14: mod_base = OTHER; note = 2'-O-methyl modified nucleotide
  modified_base 15: mod_base = OTHER; note = 2'-O-methyl modified nucleotide
  modified_base 16: mod_base = OTHER; note = 2'-O-methyl modified nucleotide
  modified_base 17: mod_base = OTHER; note = 2'-O-methyl modified nucleotide
  modified_base 18: mod_base = OTHER; note = 2'-O-methyl modified nucleotide
  modified_base 19: mod_base = OTHER; note = 2'-O-methyl modified nucleotide
  modified_base 23: mod_base = OTHER; note = 2'-O-methyl modified nucleotide
  modified_base 24: mod_base = OTHER; note = 2'-O-methyl modified nucleotide
  modified_base 27: mod_base = OTHER; note = 2'-O-methyl modified nucleotide
  modified_base 30: mod_base = OTHER; note = nucleotide with phosphorothioate linkage
  modified_base 34: mod_base = OTHER; note = 2'-O-methyl modified nucleotide
  modified_base 35: mod_base = OTHER; note = 2'-O-methyl modified nucleotide
  modified_base 37: mod_base = OTHER; note = 2'-O-methyl modified nucleotide
  modified_base 38: mod_base = OTHER; note = 2'-O-methyl modified nucleotide
  modified_base 39: mod_base = OTHER; note = 2'-O-methyl modified nucleotide
  modified_base 40: mod_base = OTHER; note = 2'-O-methyl modified nucleotide
  modified_base 41: mod_base = OTHER; note = 2'-O-methyl modified nucleotide
  modified_base 42: mod_base = OTHER; note = 2'-O-methyl modified nucleotide
  modified_base 43: mod_base = OTHER; note = 2'-O-methyl modified nucleotide
  modified_base 44: mod_base = OTHER; note = 2'-O-methyl modified nucleotide
  modified_base 45: mod_base = OTHER; note = 2'-O-methyl modified nucleotide
  modified_base 46: mod_base = OTHER; note = 2'-O-methyl modified nucleotide
  modified_base 51: mod_base = OTHER; note = 2'-O-methyl modified nucleotide
  modified_base 53: mod_base = OTHER; note = 2'-O-methyl modified nucleotide
  modified_base 56: mod_base = OTHER; note = 2'-O-methyl modified nucleotide
  modified_base 58: mod_base = OTHER; note = 2'-O-methyl modified nucleotide
  modified_base 59: mod_base = OTHER; note = 2'-O-methyl modified nucleotide
  modified_base 60: mod_base = OTHER; note = 2'-O-methyl modified nucleotide
  modified_base 61: mod_base = OTHER; note = 2'-O-methyl modified nucleotide
  modified_base 62: mod_base = OTHER; note = 2'-O-methyl modified nucleotide
  modified_base 63: mod_base = OTHER; note = 2'-O-methyl modified nucleotide
  modified_base 65: mod_base = OTHER; note = 2'-O-methyl modified nucleotide
  modified_base 66: mod_base = OTHER; note = 2'-O-methyl modified nucleotide
  modified_base 67: mod_base = OTHER; note = 2'-O-methyl modified nucleotide
  modified_base 68: mod_base = OTHER; note = 2'-O-methyl modified nucleotide
  modified_base 75: mod_base = OTHER; note = nucleotide with phosphorothioate linkage
  modified_base 76: mod_base = OTHER; note = 2'-O-methyl modified nucleotide with phosphorothioate linkage
  modified_base 77: mod_base = OTHER; note = 2'-O-methyl modified nucleotide

SEQ ID NO: 719 - RNA, 77 nt, synthetic construct; identical to SEQ ID NO: 701
  source 1..77: mol_type = other RNA
  modified_base 1: mod_base = OTHER; note = 2'-O-methyl modified nucleotide
  modified_base 5: mod_base = OTHER; note = 2'-O-methyl modified nucleotide
  modified_base 6: mod_base = OTHER; note = 2'-O-methyl modified nucleotide
  modified_base 7: mod_base = OTHER; note = 2'-O-methyl modified nucleotide
  modified_base 8: mod_base = OTHER; note = 2'-O-methyl modified nucleotide
  modified_base 13: mod_base = OTHER; note = 2'-O-methyl modified nucleotide
  modified_base 14: mod_base = OTHER; note = 2'-O-methyl modified nucleotide
  modified_base 15: mod_base = OTHER; note = 2'-O-methyl modified nucleotide
  modified_base 16: mod_base = OTHER; note = 2'-O-methyl modified nucleotide
  modified_base 17: mod_base = OTHER; note = 2'-O-methyl modified nucleotide
  modified_base 18: mod_base = OTHER; note = 2'-O-methyl modified nucleotide
  modified_base 19: mod_base = OTHER; note = 2'-O-methyl modified nucleotide
  modified_base 23: mod_base = OTHER; note = 2'-O-methyl modified nucleotide
  modified_base 24: mod_base = OTHER; note = 2'-O-methyl modified nucleotide
  modified_base 27: mod_base = OTHER; note = 2'-O-methyl modified nucleotide
  modified_base 34: mod_base = OTHER; note = 2'-O-methyl modified nucleotide
  modified_base 35: mod_base = OTHER; note = 2'-O-methyl modified nucleotide
  modified_base 37: mod_base = OTHER; note = 2'-O-methyl modified nucleotide
  modified_base 38: mod_base = OTHER; note = 2'-O-methyl modified nucleotide
  modified_base 39: mod_base = OTHER; note = 2'-O-methyl modified nucleotide
  modified_base 40: mod_base = OTHER; note = 2'-O-methyl modified nucleotide
  modified_base 41: mod_base = OTHER; note = 2'-O-methyl modified nucleotide
  modified_base 42: mod_base = OTHER; note = 2'-O-methyl modified nucleotide
  modified_base 43: mod_base = OTHER; note = 2'-O-methyl modified nucleotide
  modified_base 44: mod_base = OTHER; note = 2'-O-methyl modified nucleotide
  modified_base 45: mod_base = OTHER; note = 2'-O-methyl modified nucleotide
  modified_base 46: mod_base = OTHER; note = 2'-O-methyl modified nucleotide
  modified_base 51: mod_base = OTHER; note = 2'-O-methyl modified nucleotide
  modified_base 53: mod_base = OTHER; note = 2'-O-methyl modified nucleotide
  modified_base 56: mod_base = OTHER; note = 2'-O-methyl modified nucleotide
  modified_base 58: mod_base = OTHER; note = 2'-O-methyl modified nucleotide
  modified_base 59: mod_base = OTHER; note = 2'-O-methyl modified nucleotide
  modified_base 60: mod_base = OTHER; note = 2'-O-methyl modified nucleotide
  modified_base 61: mod_base = OTHER; note = 2'-O-methyl modified nucleotide
  modified_base 62: mod_base = OTHER; note = 2'-O-methyl modified nucleotide
  modified_base 63: mod_base = OTHER; note = 2'-O-methyl modified nucleotide
  modified_base 65: mod_base = OTHER; note = 2'-O-methyl modified nucleotide
  modified_base 66: mod_base = OTHER; note = 2'-O-methyl modified nucleotide
  modified_base 67: mod_base = OTHER; note = 2'-O-methyl modified nucleotide
  modified_base 68: mod_base = OTHER; note = 2'-O-methyl modified nucleotide
  modified_base 75: mod_base = OTHER; note = nucleotide with phosphorothioate linkage
  modified_base 76: mod_base = OTHER; note = 2'-O-methyl modified nucleotide with phosphorothioate linkage
  modified_base 77: mod_base = OTHER; note = 2'-O-methyl modified nucleotide

SEQ ID NO: 720 - RNA, 81 nt, synthetic construct
  source 1..81: mol_type = other RNA
  modified_base 1: mod_base = OTHER; note = 2'-O-methyl modified nucleotide
  modified_base 5: mod_base = OTHER; note = 2'-O-methyl modified nucleotide
  modified_base 6: mod_base = OTHER; note = 2'-O-methyl modified nucleotide
  modified_base 7: mod_base = OTHER; note = 2'-O-methyl modified nucleotide
  modified_base 8: mod_base = OTHER; note = 2'-O-methyl modified nucleotide
  modified_base 13: mod_base = OTHER; note = 2'-O-methyl modified nucleotide
  modified_base 14: mod_base = OTHER; note = 2'-O-methyl modified nucleotide
  modified_base 15: mod_base = OTHER; note = 2'-O-methyl modified nucleotide
  modified_base 16: mod_base = OTHER; note = 2'-O-methyl modified nucleotide
  modified_base 17: mod_base = OTHER; note = 2'-O-methyl modified nucleotide
  modified_base 18: mod_base = OTHER; note = 2'-O-methyl modified nucleotide
  modified_base 19: mod_base = OTHER; note = 2'-O-methyl modified nucleotide
  modified_base 20: mod_base = OTHER; note = 2'-O-methyl modified nucleotide
  modified_base 21: mod_base = OTHER; note = 2'-O-methyl modified nucleotide
  modified_base 22: mod_base = OTHER; note = 2'-O-methyl modified nucleotide
  modified_base 23: mod_base = OTHER; note = 2'-O-methyl modified nucleotide
  modified_base 27: mod_base = OTHER; note = 2'-O-methyl modified nucleotide
  modified_base 28: mod_base = OTHER; note = 2'-O-methyl modified nucleotide
  modified_base 31: mod_base = OTHER; note = 2'-O-methyl modified nucleotide
  modified_base 34: mod_base = OTHER; note = nucleotide with phosphorothioate linkage
  modified_base 38: mod_base = OTHER; note = 2'-O-methyl modified nucleotide
  modified_base 39: mod_base = OTHER; note = 2'-O-methyl modified nucleotide
  modified_base 41: mod_base = OTHER; note = 2'-O-methyl modified nucleotide
  modified_base 42: mod_base = OTHER; note = 2'-O-methyl modified nucleotide
  modified_base 43: mod_base = OTHER; note = 2'-O-methyl modified nucleotide
  modified_base 44: mod_base = OTHER; note = 2'-O-methyl modified nucleotide
  modified_base 45: mod_base = OTHER; note = 2'-O-methyl modified nucleotide
  modified_base 46: mod_base = OTHER; note = 2'-O-methyl modified nucleotide
  modified_base 47: mod_base = OTHER; note = 2'-O-methyl modified nucleotide
  modified_base 48: mod_base = OTHER; note = 2'-O-methyl modified nucleotide
  modified_base 49: mod_base = OTHER; note = 2'-O-methyl modified nucleotide
  modified_base 50: mod_base = OTHER; note = 2'-O-methyl modified nucleotide
  modified_base 55: mod_base = OTHER; note = 2'-O-methyl modified nucleotide
  modified_base 57: mod_base = OTHER; note = 2'-O-methyl modified nucleotide
  modified_base 60: mod_base = OTHER; note = 2'-O-methyl modified nucleotide
  modified_base 66: mod_base = OTHER; note = 2'-O-methyl modified nucleotide
  modified_base 67: mod_base = OTHER; note = 2'-O-methyl modified nucleotide
  modified_base 69: mod_base = OTHER; note = 2'-O-methyl modified nucleotide
  modified_base 70: mod_base = OTHER; note = 2'-O-methyl modified nucleotide
  modified_base 71: mod_base = OTHER; note = 2'-O-methyl modified nucleotide
  modified_base 72: mod_base = OTHER; note = 2'-O-methyl modified nucleotide
  modified_base 79: mod_base = OTHER; note = nucleotide with phosphorothioate linkage
  modified_base 80: mod_base = OTHER; note = 2'-O-methyl modified nucleotide with phosphorothioate linkage
  modified_base 81: mod_base = OTHER; note = 2'-O-methyl modified nucleotide
gttgtagctcccttcgaaagaccgttgctacaataaggccgtcgaaagatgtgccgcaacgctctgccttctggcatcgtt

SEQ ID NO: 721 - RNA, 81 nt, synthetic construct; identical to SEQ ID NO: 720
  source 1..81: mol_type = other RNA
  modified_base 1: mod_base = OTHER; note = 2'-O-methyl modified nucleotide
  modified_base 5: mod_base = OTHER; note = 2'-O-methyl modified nucleotide
  modified_base 6: mod_base = OTHER; note = 2'-O-methyl modified nucleotide
  modified_base 7: mod_base = OTHER; note = 2'-O-methyl modified nucleotide
  modified_base 8: mod_base = OTHER; note = 2'-O-methyl modified nucleotide
  modified_base 13: mod_base = OTHER; note = 2'-O-methyl modified nucleotide
  modified_base 14: mod_base = OTHER; note = 2'-O-methyl modified nucleotide
  modified_base 15: mod_base = OTHER; note = 2'-O-methyl modified nucleotide
  modified_base 16: mod_base = OTHER; note = 2'-O-methyl modified nucleotide
  modified_base 17: mod_base = OTHER; note = 2'-O-methyl modified nucleotide
  modified_base 18: mod_base = OTHER; note = 2'-O-methyl modified nucleotide
  modified_base 19: mod_base = OTHER; note = 2'-O-methyl modified nucleotide
  modified_base 20: mod_base = OTHER; note = 2'-O-methyl modified nucleotide
  modified_base 21: mod_base = OTHER; note = 2'-O-methyl modified nucleotide
  modified_base 22: mod_base = OTHER; note = 2'-O-methyl modified nucleotide
  modified_base 23: mod_base = OTHER; note = 2'-O-methyl modified nucleotide
  modified_base 27: mod_base = OTHER; note = 2'-O-methyl modified nucleotide
  modified_base 28: mod_base = OTHER; note = 2'-O-methyl modified nucleotide
  modified_base 31: mod_base = OTHER; note = 2'-O-methyl modified nucleotide
  modified_base 38: mod_base = OTHER; note = 2'-O-methyl modified nucleotide
  modified_base 39: mod_base = OTHER; note = 2'-O-methyl modified nucleotide
  modified_base 41: mod_base = OTHER; note = 2'-O-methyl modified nucleotide
  modified_base 42: mod_base = OTHER; note = 2'-O-methyl modified nucleotide
  modified_base 43: mod_base = OTHER; note = 2'-O-methyl modified nucleotide
  modified_base 44: mod_base = OTHER; note = 2'-O-methyl modified nucleotide
  modified_base 45: mod_base = OTHER; note = 2'-O-methyl modified nucleotide
  modified_base 46: mod_base = OTHER; note = 2'-O-methyl modified nucleotide
  modified_base 47: mod_base = OTHER; note = 2'-O-methyl modified nucleotide
  modified_base 48: mod_base = OTHER; note = 2'-O-methyl modified nucleotide
  modified_base 49: mod_base = OTHER; note = 2'-O-methyl modified nucleotide
  modified_base 50: mod_base = OTHER; note = 2'-O-methyl modified nucleotide
  modified_base 55: mod_base = OTHER; note = 2'-O-methyl modified nucleotide
  modified_base 57: mod_base = OTHER; note = 2'-O-methyl modified nucleotide
  modified_base 60: mod_base = OTHER; note = 2'-O-methyl modified nucleotide
  modified_base 66: mod_base = OTHER; note = 2'-O-methyl modified nucleotide
  modified_base 67: mod_base = OTHER; note = 2'-O-methyl modified nucleotide
  modified_base 69: mod_base = OTHER; note = 2'-O-methyl modified nucleotide
  modified_base 70: mod_base = OTHER; note = 2'-O-methyl modified nucleotide
  modified_base 71: mod_base = OTHER; note = 2'-O-methyl modified nucleotide
  modified_base 72: mod_base = OTHER; note = 2'-O-methyl modified nucleotide
  modified_base 79: mod_base = OTHER; note = nucleotide with phosphorothioate linkage
  modified_base 80: mod_base = OTHER; note = 2'-O-methyl modified nucleotide with phosphorothioate linkage
  modified_base 81: mod_base = OTHER; note = 2'-O-methyl modified nucleotide

SEQ ID NO: 722 - RNA, 81 nt, synthetic construct; identical to SEQ ID NO: 720
  source 1..81: mol_type = other RNA
  modified_base 1: mod_base = OTHER; note = 2'-O-methyl modified nucleotide
  modified_base 5: mod_base = OTHER; note = 2'-O-methyl modified nucleotide
  modified_base 6: mod_base = OTHER; note = 2'-O-methyl modified nucleotide
  modified_base 7: mod_base = OTHER; note = 2'-O-methyl modified nucleotide
  modified_base 8: mod_base = OTHER; note = 2'-O-methyl modified nucleotide
  modified_base 13: mod_base = OTHER; note = 2'-O-methyl modified nucleotide
  modified_base 14: mod_base = OTHER; note = 2'-O-methyl modified nucleotide
  modified_base 15: mod_base = OTHER; note = 2'-O-methyl modified nucleotide
  modified_base 16: mod_base = OTHER; note = 2'-O-methyl modified nucleotide
  modified_base 17: mod_base = OTHER; note = 2'-O-methyl modified nucleotide
  modified_base 18: mod_base = OTHER; note = 2'-O-methyl modified nucleotide
  modified_base 19: mod_base = OTHER; note = 2'-O-methyl modified nucleotide
  modified_base 20: mod_base = OTHER; note = 2'-O-methyl modified nucleotide
  modified_base 21: mod_base = OTHER; note = 2'-O-methyl modified nucleotide
  modified_base 22: mod_base = OTHER; note = 2'-O-methyl modified nucleotide
  modified_base 23: mod_base = OTHER; note = 2'-O-methyl modified nucleotide
  modified_base 27: mod_base = OTHER; note = 2'-O-methyl modified nucleotide
  modified_base 28: mod_base = OTHER; note = 2'-O-methyl modified nucleotide
  modified_base 31: mod_base = OTHER; note = 2'-O-methyl modified nucleotide
  modified_base 34: mod_base = OTHER; note = nucleotide with phosphorothioate linkage
  modified_base 38: mod_base = OTHER; note = 2'-O-methyl modified nucleotide
  modified_base 39: mod_base = OTHER; note = 2'-O-methyl modified nucleotide
  modified_base 41: mod_base = OTHER; note = 2'-O-methyl modified nucleotide
  modified_base 42: mod_base = OTHER; note = 2'-O-methyl modified nucleotide
  modified_base 43: mod_base = OTHER; note = 2'-O-methyl modified nucleotide
  modified_base 44: mod_base = OTHER; note = 2'-O-methyl modified nucleotide
  modified_base 45: mod_base = OTHER; note = 2'-O-methyl modified nucleotide
  modified_base 46: mod_base = OTHER; note = 2'-O-methyl modified nucleotide
  modified_base 47: mod_base = OTHER; note = 2'-O-methyl modified nucleotide
  modified_base 48: mod_base = OTHER; note = 2'-O-methyl modified nucleotide
  modified_base 49: mod_base = OTHER; note = 2'-O-methyl modified nucleotide
  modified_base 50: mod_base = OTHER; note = 2'-O-methyl modified nucleotide
  modified_base 55: mod_base = OTHER; note = 2'-O-methyl modified nucleotide
  modified_base 57: mod_base = OTHER; note = 2'-O-methyl modified nucleotide
  modified_base 60: mod_base = OTHER; note = 2'-O-methyl modified nucleotide
  modified_base 62: mod_base = OTHER; note = 2'-O-methyl modified nucleotide
  modified_base 63: mod_base = OTHER; note = 2'-O-methyl modified nucleotide
  modified_base 64: mod_base = OTHER; note = 2'-O-methyl modified nucleotide
  modified_base 65: mod_base = OTHER; note = 2'-O-methyl modified nucleotide
  modified_base 66: mod_base = OTHER; note = 2'-O-methyl modified nucleotide
  modified_base 67: mod_base = OTHER; note = 2'-O-methyl modified nucleotide
  modified_base 69: mod_base = OTHER; note = 2'-O-methyl modified nucleotide
  modified_base 70: mod_base = OTHER; note = 2'-O-methyl modified nucleotide
  modified_base 71: mod_base = OTHER; note = 2'-O-methyl modified nucleotide
  modified_base 72: mod_base = OTHER; note = 2'-O-methyl modified nucleotide
  modified_base 79: mod_base = OTHER; note = nucleotide with phosphorothioate linkage
  modified_base 80: mod_base = OTHER; note = 2'-O-methyl modified nucleotide with phosphorothioate linkage
  modified_base 81: mod_base = OTHER; note = 2'-O-methyl modified nucleotide

SEQ ID NO: 723 - RNA, 81 nt, synthetic construct; identical to SEQ ID NO: 720
  source 1..81: mol_type = other RNA
  modified_base 1: mod_base = OTHER; note = 2'-O-methyl modified nucleotide
  modified_base 5: mod_base = OTHER; note = 2'-O-methyl modified nucleotide
  modified_base 6: mod_base = OTHER; note = 2'-O-methyl modified nucleotide
  modified_base 7: mod_base = OTHER; note = 2'-O-methyl modified nucleotide
  modified_base 8: mod_base = OTHER; note = 2'-O-methyl modified nucleotide
  modified_base 13: mod_base = OTHER; note = 2'-O-methyl modified nucleotide
  modified_base 14: mod_base = OTHER; note = 2'-O-methyl modified nucleotide
  modified_base 15: mod_base = OTHER; note = 2'-O-methyl modified nucleotide
  modified_base 16: mod_base = OTHER; note = 2'-O-methyl modified nucleotide
  modified_base 17: mod_base = OTHER; note = 2'-O-methyl modified nucleotide
  modified_base 18: mod_base = OTHER; note = 2'-O-methyl modified nucleotide
  modified_base 19: mod_base = OTHER; note = 2'-O-methyl modified nucleotide
  modified_base 20: mod_base = OTHER; note = 2'-O-methyl modified nucleotide
  modified_base 21: mod_base = OTHER; note = 2'-O-methyl modified nucleotide
  modified_base 22: mod_base = OTHER; note = 2'-O-methyl modified nucleotide
  modified_base 23: mod_base = OTHER; note = 2'-O-methyl modified nucleotide
  modified_base 27: mod_base = OTHER; note = 2'-O-methyl modified nucleotide
  modified_base 28: mod_base = OTHER; note = 2'-O-methyl modified nucleotide
  modified_base 31: mod_base = OTHER; note = 2'-O-methyl modified nucleotide
  modified_base 38: mod_base = OTHER; note = 2'-O-methyl modified nucleotide
  modified_base 39: mod_base = OTHER; note = 2'-O-methyl modified nucleotide
  modified_base 41: mod_base = OTHER; note = 2'-O-methyl modified nucleotide
  modified_base 42: mod_base = OTHER; note = 2'-O-methyl modified nucleotide
  modified_base 43: mod_base = OTHER; note = 2'-O-methyl modified nucleotide
  modified_base 44: mod_base = OTHER; note = 2'-O-methyl modified nucleotide
  modified_base 45: mod_base = OTHER; note = 2'-O-methyl modified nucleotide
  modified_base 46: mod_base = OTHER; note = 2'-O-methyl modified nucleotide
  modified_base 47: mod_base = OTHER; note = 2'-O-methyl modified nucleotide
  modified_base 48: mod_base = OTHER; note = 2'-O-methyl modified nucleotide
  modified_base 49: mod_base = OTHER; note = 2'-O-methyl modified nucleotide
  modified_base 50: mod_base = OTHER; note = 2'-O-methyl modified nucleotide
  modified_base 55: mod_base = OTHER; note = 2'-O-methyl modified nucleotide
  modified_base 57: mod_base = OTHER; note = 2'-O-methyl modified nucleotide
  modified_base 60: mod_base = OTHER; note = 2'-O-methyl modified nucleotide
  modified_base 62: mod_base = OTHER; note = 2'-O-methyl modified nucleotide
  modified_base 63: mod_base = OTHER; note = 2'-O-methyl modified nucleotide
  modified_base 64: mod_base = OTHER; note = 2'-O-methyl modified nucleotide
  modified_base 65: mod_base = OTHER; note = 2'-O-methyl modified nucleotide
  modified_base 66: mod_base = OTHER; note = 2'-O-methyl modified nucleotide
  modified_base 67: mod_base = OTHER; note = 2'-O-methyl modified nucleotide
  modified_base 69: mod_base = OTHER; note = 2'-O-methyl modified nucleotide
  modified_base 70: mod_base = OTHER; note = 2'-O-methyl modified nucleotide
  modified_base 71: mod_base = OTHER; note = 2'-O-methyl modified nucleotide
  modified_base 72: mod_base = OTHER; note = 2'-O-methyl modified nucleotide
  modified_base 79: mod_base = OTHER; note = nucleotide with phosphorothioate linkage
  modified_base 80: mod_base = OTHER; note = 2'-O-methyl modified nucleotide with phosphorothioate linkage
  modified_base 81: mod_base = OTHER; note = 2'-O-methyl modified nucleotide

SEQ ID NO: 724-799 - skipped (76 entries)

SEQ ID NO: 800 - protein, 1379 aa, synthetic construct
MDKKYSIGLDIGTNSVGWAVITDEYKVPSKKFKVLGNTDRHSIKKNLIGALLFDSGETAEATRLKRTARRRYTRRKNRICYLQEIFSNEMAKVDDSFFHRLEESFLVEEDKKHERHPIFGNIVDEVAYHEKYPTIYHLRKKLVDSTDKADLRLIYLALAHMIKFRGHFLIEGDLNPDNSDVDKLFIQLVQTYNQLFEENPINASGVDAKAILSARLSKSRRLENLIAQLPGEKKNGLFGNLIALSLGLTPNFKSNFDLAEDAKLQLSKDTYDDDLDNLLAQIGDQYADLFLAAKNLSDAILLSDILRVNTEITKAPLSASMIKRYDEHHQDLTLLKALVRQQLPEKYKEIFFDQSKNGYAGYIDGGASQEEFYKFIKPILEKMDGTEELLVKLNREDLLRKQRTFDNGSIPHQIHLGELHAILRRQEDFYPFLKDNREKIEKILTFRIPYYVGPLARGNSRFAWMTRKSEETITPWNFEEVVDKGASAQSFIERMTNFDKNLPNEKVLPKHSLLYEYFTVYNELTKVKYVTEGMRKPAFLSGEQKKAIVDLLFKTNRKVTVKQLKEDYFKKIECFDSVEISGVEDRFNASLGTYHDLLKIIKDKDFLDNEENEDILEDIVLTLTLFEDREMIEERLKTYAHLFDDKVMKQLKRRRYTGWGRLSRKLINGIRDKQSGKTILDFLKSDGFANRNFMQLIHDDSLTFKEDIQKAQVSGQGDSLHEHIANLAGSPAIKKGILQTVKVVDELVKVMGRHKPENIVIEMARENQTTQKGQKNSRERMKRIEEGIKELGSQILKEHPVENTQLQNEKLYLYYLQNGRDMYVDQELDINRLSDYDVDHIVPQSFLKDDSIDNKVLTRSDKNRGKSDNVPSEEVVKKMKNYWRQLLNAKLITQRKFDNLTKAERGGLSELDKAGFIKRQLVETRQITKHVAQILDSRMNTKYDENDKLIREVKVITLKSKLVSDFRKDFQFYKVREINNYHHAHDAYLNAVVGTALIKKYPKLESEFVYGDYKVYDVRKMIAKSEQEIGKATAKYFFYSNIMNFFKTEITLANGEIRKRPLIETNGETGEIVWDKGRDFATVRKVLSMPQVNIVKKTEVQTGGFSKESILPKRNSDKLIARKKDWDPKKYGGFDSPTVAYSVLVVAKVEKGKSKKLKSVKELLGITIMERSSFEKNPIDFLEAKGYKEVKKDLIIKLPKYSLFELENGRKRMLASAGELQKGNELALPSKYVNFLYLASHYEKLKGSPEDNEQKQLFVEQHKHYLDEIIEQISEFSKRVILADANLDKVLSAYNKHRDKPIREQAENIIHLFTLTNLGAPAAFKYFDTTIDRKRYTSTKEVLDATLIHQSITGLYETRIDLSQLGGDGGGSPKKKRKV

SEQ ID NO: 801 - DNA, 4140 bp, synthetic construct
  source 1..4140: mol_type = other DNA
atggacaagaagtacagcatcggactggacatcggaacaaacagcgtcggatgggcagtcatcacagacgaatacaaggtcccgagcaagaagttcaaggtcctgggaaacacagacagacacagcatcaagaagaacctgatcggagcactgctgttcgacagcggagaaacagcagaagcaacaagactgaagagaacagcaagaagaagatacacaagaagaaagaacagaatctgctacctgcaggaaatcttcagcaacgaaatggcaaaggtcgacgacagcttcttccacagactggaagaaagcttcctggtcgaagaagacaagaagcacgaaagacacccgatcttcggaaacatcgtcgacgaagtcgcataccacgaaaagtacccgacaatctaccacctgagaaagaagctggtcgacagcacagacaaggcagacctgagactgatctacctggcactggcacacatgatcaagttcagaggacacttcctgatcgaaggagacctgaacccggacaacagcgacgtcgacaagctgttcatccagctggtccagacatacaaccagctgttcgaagaaaacccgatcaacgcaagcggagtcgacgcaaaggcaatcctgagcgcaagactgagcaagagcagaagactggaaaacctgatcgcacagctgccgggagaaaagaagaacggactgttcggaaacctgatcgcactgagcctgggactgacaccgaacttcaagagcaacttcgacctggcagaagacgcaaagctgcagctgagcaaggacacatacgacgacgacctggacaacctgctggcacagatcggagaccagtacgcagacctgttcctggcagcaaagaacctgagcgacgcaatcctgctgagcgacatcctgagagtcaacacagaaatcacaaaggcaccgctgagcgcaagcatgatcaagagatacgacgaacaccaccaggacctgacactgctgaaggcactggtcagacagcagctgccggaaaagtacaaggaaatcttcttcgaccagagcaagaacggatacgcaggatacatcgacggaggagcaagccaggaagaattctacaagttcatcaagccgatcctggaaaagatggacggaacagaagaactgctggtcaagctgaacagagaagacctgctgagaaagcagagaacattcgacaacggaagcatcccgcaccagatccacctgggagaactgcacgcaatcctgagaagacaggaagacttctacccgttcctgaaggacaacagagaaaagatcgaaaagatcctgacattcagaatcccgtactacgtcggaccgctggcaagaggaaacagcagattcgcatggatgacaagaaagagcgaagaaacaatcacaccgtggaacttcgaagaagtcgtcgacaagggagcaagcgcacagagcttcatcgaaagaatgacaaacttcgacaagaacctgccgaacgaaaaggtcctgccgaagcacagcctgctgtacgaatacttcacagtctacaacgaactgacaaaggtcaagtacgtcacagaaggaatgagaaagccggcattcctgagcggagaacagaagaaggcaatcgtcgacctgctgttcaagacaaacagaaaggtcacagtcaagcagctgaaggaagactacttcaagaagatcgaatgcttcgacagcgtcgaaatcagcggagtcgaagacagattcaacgcaagcctgggaacataccacgacctgctgaagatcatcaaggacaaggacttcctggacaacgaagaaaacgaagacatcctggaagacatcgtcctgacactgacactgttcgaagacagagaaatgatcgaagaaagactgaagacatacgcacacctgttcgacgacaaggtcatgaagcagctgaagagaagaagatacacaggatggggaagactgagcagaaagctgatcaacggaatcagagacaagcagagcggaaagacaatcctggacttcctgaagagcgacggattcgcaaacagaaacttcatgcagctgatccacgacgacagcctgacattcaaggaagacatccagaaggcacaggtcagcggacagggagacagcctgcacgaacacatcgcaaacctggcaggaagcccggcaatcaagaagggaatcctgcagacagtcaaggtcgtcgacgaactggtcaaggtcatgggaagacacaagccggaaaacatcgtcatcgaaatggcaagagaaaaccagacaacacagaagggacagaagaacagcagagaaagaatgaagagaatcgaagaaggaatcaaggaactgggaagccagatcctgaaggaacacccggtcgaaaacacacagctgcagaacgaaaagctgtacctgtactacctgcagaacggaagagacatgtacgtcgaccaggaactggacatcaacagactgagcgactacgacgtcgaccacatcgtcccgcagagcttcctgaaggacgacagcatcgacaacaaggtcctgacaagaagcgacaagaacagaggaaagagcgacaacgtcccgagcgaagaagtcgtcaagaagatgaagaactactggagacagctgctgaacgcaaagctgatcacacagagaaagttcgacaacctgacaaaggcagagagaggaggactgagcgaactggacaaggcaggattcatcaagagacagctggtcgaaacaagacagatcacaaagcacgtcgcacagatcctggacagcagaatgaacacaaagtacgacgaaaacgacaagctgatcagagaagtcaaggtcatcacactgaagagcaagctggtcagcgacttcagaaaggacttccagttctacaaggtcagagaaatcaacaactaccaccacgcacacgacgcatacctgaacgcagtcgtcggaacagcactgatcaagaagtacccgaagctggaaagcgaattcgtctacggagactacaaggtctacgacgtcagaaagatgatcgcaaagagcgaacaggaaatcggaaaggcaacagcaaagtacttcttctacagcaacatcatgaacttcttcaagacagaaatcacactggcaaacggagaaatcagaaagagaccgctgatcgaaacaaacggagaaacaggagaaatcgtctgggacaagggaagagacttcgcaacagtcagaaaggtcctgagcatgccgcaggtcaacatcgtcaagaagacagaagtccagacaggaggattcagcaaggaaagcatcctgccgaagagaaacagcgacaagctgatcgcaagaaagaaggactgggacccgaagaagtacggaggattcgacagcccgacagtcgcatacagcgtcctggtcgtcgcaaaggtcgaaaagggaaagagcaagaagctgaagagcgtcaaggaactgctgggaatcacaatcatggaaagaagcagcttcgaaaagaacccgatcgacttcctggaagcaaagggatacaaggaagtcaagaaggacctgatcatcaagctgccgaagtacagcctgttcgaactggaaaacggaagaaagagaatgctggcaagcgcaggagaactgcagaagggaaacgaactggcactgccgagcaagtacgtcaacttcctgtacctggcaagccactacgaaaagctgaagggaagcccggaagacaacgaacagaagcagctgttcgtcgaacagcacaagcactacctggacgaaatcatcgaacagatcagcgaattcagcaagagagtcatcctggcagacgcaaacctggacaaggtcctgagcgcatacaacaagcacagagacaagccgatcagagaacaggcagaaaacatcatccacctgttcacactgacaaacctgggagcaccggcagcattcaagtacttcgacacaacaatcgacagaaagagatacacaagcacaaaggaagtcctggacgcaacactgatccaccagagcatcacaggactgtacgaaacaagaatcgacctgagccagctgggaggagacggaggaggaagcccgaagaagaagagaaaggtctag

SEQ ID NO: 802 - DNA, 4140 bp, synthetic construct
  source 1..4140: mol_type = other DNA
atggacaagaagtactccatcggcctggacatcggcaccaactccgtgggctgggccgtgatcaccgacgagtacaaggtgccctccaagaagttcaaggtgctgggcaacaccgaccggcactccatcaagaagaacctgatcggcgccctgctgttcgactccggcgagaccgccgaggccacccggctgaagcggaccgcccggcggcggtacacccggcggaagaaccggatctgctacctgcaggagatcttctccaacgagatggccaaggtggacgactccttcttccaccggctggaggagtccttcctggtggaggaggacaagaagcacgagcggcaccccatcttcggcaacatcgtggacgaggtggcctaccacgagaagtaccccaccatctaccacctgcggaagaagctggtggactccaccgacaaggccgacctgcggctgatctacctggccctggcccacatgatcaagttccggggccacttcctgatcgagggcgacctgaaccccgacaactccgacgtggacaagctgttcatccagctggtgcagacctacaaccagctgttcgaggagaaccccatcaacgcctccggcgtggacgccaaggccatcctgtccgcccggctgtccaagtcccggcggctggagaacctgatcgcccagctgcccggcgagaagaagaacggcctgttcggcaacctgatcgccctgtccctgggcctgacccccaacttcaagtccaacttcgacctggccgaggacgccaagctgcagctgtccaaggacacctacgacgacgacctggacaacctgctggcccagatcggcgaccagtacgccgacctgttcctggccgccaagaacctgtccgacgccatcctgctgtccgacatcctgcgggtgaacaccgagatcaccaaggcccccctgtccgcctccatgatcaagcggtacgacgagcaccaccaggacctgaccctgctgaaggccctggtgcggcagcagctgcccgagaagtacaaggagatcttcttcgaccagtccaagaacggctacgccggctacatcgacggcggcgcctcccaggaggagttctacaagttcatcaagcccatcctggagaagatggacggcaccgaggagctgctggtgaagctgaaccgggaggacctgctgcggaagcagcggaccttcgacaacggctccatcccccaccagatccacctgggcgagctgcacgccatcctgcggcggcaggaggacttctaccccttcctgaaggacaaccgggagaagatcgagaagatcctgaccttccggatcccctactacgtgggccccctggcccggggcaactcccggttcgcctggatgacccggaagtccgaggagaccatcaccccctggaacttcgaggaggtggtggacaagggcgcctccgcccagtccttcatcgagcggatgaccaacttcgacaagaacctgcccaacgagaaggtgctgcccaagcactccctgctgtacgagtacttcaccgtgtacaacgagctgaccaaggtgaagtacgtgaccgagggcatgcggaagcccgccttcctgtccggcgagcagaagaaggccatcgtggacctgctgttcaagaccaaccggaaggtgaccgtgaagcagctgaaggaggactacttcaagaagatcgagtgcttcgactccgtggagatctccggcgtggaggaccggttcaacgcctccctgggcacctaccacgacctgctgaagatcatcaaggacaaggacttcctggacaacgaggagaacgaggacatcctggaggacatcgtgctgaccctgaccctgttcgaggaccgggagatgatcgaggagcggctgaagacctacgcccacctgttcgacgacaaggtgatgaagcagctgaagcggcggcggtacaccggctggggccggctgtcccggaagctgatcaacggcatccgggacaagcagtccggcaagaccatcctggacttcctgaagtccgacggcttcgccaaccggaacttcatgcagctgatccacgacgactccctgaccttcaaggaggacatccagaaggcccaggtgtccggccagggcgactccctgcacgagcacatcgccaacctggccggctcccccgccatcaagaagggcatcctgcagaccgtgaaggtggtggacgagctggtgaaggtgatgggccggcacaagcccgagaacatcgtgatcgagatggcccgggagaaccagaccacccagaagggccagaagaactcccgggagcggatgaagcggatcgaggagggcatcaaggagctgggctcccagatcctgaaggagcaccccgtggagaacacccagctgcagaacgagaagctgtacctgtactacctgcagaacggccgggacatgtacgtggaccaggagctggacatcaaccggctgtccgactacgacgtggaccacatcgtgccccagtccttcctgaaggacgactccatcgacaacaaggtgctgacccggtccgacaagaaccggggcaagtccgacaacgtgccctccgaggaggtggtgaagaagatgaagaactactggcggcagctgctgaacgccaagctgatcacccagcggaagttcgacaacctgaccaaggccgagcggggcggcctgtccgagctggacaaggccggcttcatcaagcggcagctggtggagacccggcagatcaccaagcacgtggcccagatcctggactcccggatgaacaccaagtacgacgagaacgacaagctgatccgggaggtgaaggtgatcaccctgaagtccaagctggtgtccgacttccggaaggacttccagttctacaaggtgcgggagatcaacaactaccaccacgcccacgacgcctacctgaacgccgtggtgggcaccgccctgatcaagaagtaccccaagctggagtccgagttcgtgtacggcgactacaaggtgtacgacgtgcggaagatgatcgccaagtccgagcaggagatcggcaaggccaccgccaagtacttcttctactccaacatcatgaacttcttcaagaccgagatcaccctggccaacggcgagatccggaagcggcccctgatcgagaccaacggcgagaccggcgagatcgtgtgggacaagggccgggacttcgccaccgtgcggaaggtgctgtccatgccccaggtgaacatcgtgaagaagaccgaggtgcagaccggcggcttctccaaggagtccatcctgcccaagcggaactccgacaagctgatcgcccggaagaaggactgggaccccaagaagtacggcggcttcgactcccccaccgtggcctactccgtgctggtggtggccaaggtggagaagggcaagtccaagaagctgaagtccgtgaaggagctgctgggcatcaccatcatggagcggtcctccttcgagaagaaccccatcgacttcctggaggccaagggctacaaggaggtgaagaaggacctgatcatcaagctgcccaagtactccctgttcgagctggagaacggccggaagcggatgctggcctccgccggcgagctgcagaagggcaacgagctggccctgccctccaagtacgtgaacttcctgtacctggcctcccactacgagaagctgaagggctcccccgaggacaacgagcagaagcagctgttcgtggagcagcacaagcactacctggacgagatcatcgagcagatctccgagttctccaagcgggtgatcctggccgacgccaacctggacaaggtgctgtccgcctacaacaagcaccgggacaagcccatccgggagcaggccgagaacatcatccacctgttcaccctgaccaacctgggcgcccccgccgccttcaagtacttcgacaccaccatcgaccggaagcggtacacctccaccaaggaggtgctggacgccaccctgatccaccagtccatcaccggcctgtacgagacccggatcgacctgtcccagctgggcggcgacggcggcggctcccccaagaagaagcggaaggtgtga

SEQ ID NO: 803 - RNA, 4197 nt, synthetic construct
  source 1..4197: mol_type = other RNA
atggacaagaagtactccatcggcctggacatcggcaccaactccgtgggctgggccgtgatcaccgacgagtacaaggtgccctccaagaagttcaaggtgctgggcaacaccgaccggcactccatcaagaagaacctgatcggcgccctgctgttcgactccggcgagaccgccgaggccacccggctgaagcggaccgcccggcggcggtacacccggcggaagaaccggatctgctacctgcaggagatcttctccaacgagatggccaaggtggacgactccttcttccaccggctggaggagtccttcctggtggaggaggacaagaagcacgagcggcaccccatcttcggcaacatcgtggacgaggtggcctaccacgagaagtaccccaccatctaccacctgcggaagaagctggtggactccaccgacaaggccgacctgcggctgatctacctggccctggcccacatgatcaagttccggggccacttcctgatcgagggcgacctgaaccccgacaactccgacgtggacaagctgttcatccagctggtgcagacctacaaccagctgttcgaggagaaccccatcaacgcctccggcgtggacgccaaggccatcctgtccgcccggctgtccaagtcccggcggctggagaacctgatcgcccagctgcccggcgagaagaagaacggcctgttcggcaacctgatcgccctgtccctgggcctgacccccaacttcaagtccaacttcgacctggccgaggacgccaagctgcagctgtccaaggacacctacgacgacgacctggacaacctgctggcccagatcggcgaccagtacgccgacctgttcctggccgccaagaacctgtccgacgccatcctgctgtccgacatcctgcgggtgaacaccgagatcaccaaggcccccctgtccgcctccatgatcaagcggtacgacgagcaccaccaggacctgaccctgctgaaggccctggtgcggcagcagctgcccgagaagtacaaggagatcttcttcgaccagtccaagaacggctacgccggctacatcgacggcggcgcctcccaggaggagttctacaagttcatcaagcccatcctggagaagatggacggcaccgaggagctgctggtgaagctgaaccgggaggacctgctgcggaagcagcggaccttcgacaacggctccatcccccaccagatccacctgggcgagctgcacgccatcctgcggcggcaggaggacttctaccccttcctgaaggacaaccgggagaagatcgagaagatcctgaccttccggatcccctactacgtgggccccctggcccggggcaactcccggttcgcctggatgacccggaagtccgaggagaccatcaccccctggaacttcgaggaggtggtggacaagggcgcctccgcccagtccttcatcgagcggatgaccaacttcgacaagaacctgcccaacgagaaggtgctgcccaagcactccctgctgtacgagtacttcaccgtgtacaacgagctgaccaaggtgaagtacgtgaccgagggcatgcggaagcccgccttcctgtccggcgagcagaagaaggccatcgtggacctgctgttcaagaccaaccggaaggtgaccgtgaagcagctgaaggaggactacttcaagaagatcgagtgcttcgactccgtggagatctccggcgtggaggaccggttcaacgcctccctgggcacctaccacgacctgctgaagatcatcaaggacaaggacttcctggacaacgaggagaacgaggacatcctggaggacatcgtgctgaccctgaccctgttcgaggaccgggagatgatcgaggagcggctgaagacctacgcccacctgttcgacgacaaggtgatgaagcagctgaagcggcggcggtacaccggctggggccggctgtcccggaagctgatcaacggcatccgggacaagcagtccggcaagaccatcctggacttcctgaagtccgacggcttcgccaaccggaacttcatgcagctgatccacgacgactccctgaccttcaaggaggacatccagaaggcccaggtgtccggccagggcgactccctgcacgagcacatcgccaacctggccggctcccccgccatcaagaagggcatcctgcagaccgtgaaggtggtggacgagctggtgaaggtgatgggccggcacaagcccgagaacatcgtgatcgagatggcccgggagaaccagaccacccagaagggccagaagaactcccgggagcggatgaagcggatcgaggagggcatcaaggagctgggctcccagatcctgaaggagcaccccgtggagaacacccagctgcagaacgagaagctgtacctgtactacctgcagaacggccgggacatgtacgtggaccaggagctggacatcaaccggctgtccgactacgacgtggaccacatcgtgccccagtccttcctgaaggacgactccatcgacaacaaggtgctgacccggtccgacaagaaccggggcaagtccgacaacgtgccctccgaggaggtggtgaagaagatgaagaactactggcggcagctgctgaacgccaagctgatcacccagcggaagttcgacaacctgaccaaggccgagcggggcggcctgtccgagctggacaaggccggcttcatcaagcggcagctggtggagacccggcagatcaccaagcacgtggcccagatcctggactcccggatgaacaccaagtacgacgagaacgacaagctgatccgggaggtgaaggtgatcaccctgaagtccaagctggtgtccgacttccggaaggacttccagttctacaaggtgcgggagatcaacaactaccaccacgcccacgacgcctacctgaacgccgtggtgggcaccgccctgatcaagaagtaccccaagctggagtccgagttcgtgtacggcgactacaaggtgtacgacgtgcggaagatgatcgccaagtccgagcaggagatcggcaaggccaccgccaagtacttcttctactccaacatcatgaacttcttcaagaccgagatcaccctggccaacggcgagatccggaagcggcccctgatcgagaccaacggcgagaccggcgagatcgtgtgggacaagggccgggacttcgccaccgtgcggaaggtgctgtccatgccccaggtgaacatcgtgaagaagaccgaggtgcagaccggcggcttctccaaggagtccatcctgcccaagcggaactccgacaagctgatcgcccggaagaaggactgggaccccaagaagtacggcggcttcgactcccccaccgtggcctactccgtgctggtggtggccaaggtggagaagggcaagtccaagaagctgaagtccgtgaaggagctgctgggcatcaccatcatggagcggtcctccttcgagaagaaccccatcgacttcctggaggccaagggctacaaggaggtgaagaaggacctgatcatcaagctgcccaagtactccctgttcgagctggagaacggccggaagcggatgctggcctccgccggcgagctgcagaagggcaacgagctggccctgccctccaagtacgtgaacttcctgtacctggcctcccactacgagaagctgaagggctcccccgaggacaacgagcagaagcagctgttcgtggagcagcacaagcactacctggacgagatcatcgagcagatctccgagttctccaagcgggtgatcctggccgacgccaacctggacaaggtgctgtccgcctacaacaagcaccgggacaagcccatccgggagcaggccgagaacatcatccacctgttcaccctgaccaacctgggcgcccccgccgccttcaagtacttcgacaccaccatcgaccggaagcggtacacctccaccaaggaggtgctggacgccaccctgatccaccagtccatcaccggcctgtacgagacccggatcgacctgtcccagctgggcggcgacggcggcggctcccccaagaagaagcggaaggtgtccgagtccgccacccccgagtccgtgtccggctggcggctgttcaagaagatctcctga

SEQ ID NO: 804 - RNA, 4782 nt, synthetic construct
  source 1..4782: mol_type = other RNA
atggaggcctcccccgcctccggcccccggcacctgatggacccccacatcttcacctccaacttcaacaacggcatcggccggcacaagacctacctgtgctacgaggtggagcggctggacaacggcacctccgtgaagatggaccagcaccggggcttcctgcacaaccaggccaagaacctgctgtgcggcttctacggccggcacgccgagctgcggttcctggacctggtgccctccctgcagctggaccccgcccagatctaccgggtgacctggttcatctcctggtccccctgcttctcctggggctgcgccggcgaggtgcgggccttcctgcaggagaacacccacgtgcggctgcggatcttcgccgcccggatctacgactacgaccccctgtacaaggaggccctgcagatgctgcgggacgccggcgcccaggtgtccatcatgacctacgacgagttcaagcactgctgggacaccttcgtggaccaccagggctgccccttccagccctgggacggcctggacgagcactcccaggccctgtccggccggctgcgggccatcctgcagaaccagggcaactccggctccgagacccccggcacctccgagtccgccacccccgagtccgacaagaagtactccatcggcctggccatcggcaccaactccgtgggctgggccgtgatcaccgacgagtacaaggtgccctccaagaagttcaaggtgctgggcaacaccgaccggcactccatcaagaagaacctgatcggcgccctgctgttcgactccggcgagaccgccgaggccacccggctgaagcggaccgcccggcggcggtacacccggcggaagaaccggatctgctacctgcaggagatcttctccaacgagatggccaaggtggacgactccttcttccaccggctggaggagtccttcctggtggaggaggacaagaagcacgagcggcaccccatcttcggcaacatcgtggacgaggtggcctaccacgagaagtaccccaccatctaccacctgcggaagaagctggtggactccaccgacaaggccgacctgcggctgatctacctggccctggcccacatgatcaagttccggggccacttcctgatcgagggcgacctgaaccccgacaactccgacgtggacaagctgttcatccagctggtgcagacctacaaccagctgttcgaggagaaccccatcaacgcctccggcgtggacgccaaggccatcctgtccgcccggctgtccaagtcccggcggctggagaacctgatcgcccagctgcccggcgagaagaagaacggcctgttcggcaacctgatcgccctgtccctgggcctgacccccaacttcaagtccaacttcgacctggccgaggacgccaagctgcagctgtccaaggacacctacgacgacgacctggacaacctgctggcccagatcggcgaccagtacgccgacctgttcctggccgccaagaacctgtccgacgccatcctgctgtccgacatcctgcgggtgaacaccgagatcaccaaggcccccctgtccgcctccatgatcaagcggtacgacgagcaccaccaggacctgaccctgctgaaggccctggtgcggcagcagctgcccgagaagtacaaggagatcttcttcgaccagtccaagaacggctacgccggctacatcgacggcggcgcctcccaggaggagttctacaagttcatcaagcccatcctggagaagatggacggcaccgaggagctgctggtgaagctgaaccgggaggacctgctgcggaagcagcggaccttcgacaacggctccatcccccaccagatccacctgggcgagctgcacgccatcctgcggcggcaggaggacttctaccccttcctgaaggacaaccgggagaagatcgagaagatcctgaccttccggatcccctactacgtgggccccctggcccggggcaactcccggttcgcctggatgacccggaagtccgaggagaccatcaccccctggaacttcgaggaggtggtggacaagggcgcctccgcccagtccttcatcgagcggatgaccaacttcgacaagaacctgcccaacgagaaggtgctgcccaagcactccctgctgtacgagtacttcaccgtgtacaacgagctgaccaaggtgaagtacgtgaccgagggcatgcggaagcccgccttcctgtccggcgagcagaagaaggccatcgtggacctgctgttcaagaccaaccggaaggtgaccgtgaagcagctgaaggaggactacttcaagaagatcgagtgcttcgactccgtggagatctccggcgtggaggaccggttcaacgcctccctgggcacctaccacgacctgctgaagatcatcaaggacaaggacttcctggacaacgaggagaacgaggacatcctggaggacatcgtgctgaccctgaccctgttcgaggaccgggagatgatcgaggagcggctgaagacctacgcccacctgttcgacgacaaggtgatgaagcagctgaagcggcggcggtacaccggctggggccggctgtcccggaagctgatcaacggcatccgggacaagcagtccggcaagaccatcctggacttcctgaagtccgacggcttcgccaaccggaacttcatgcagctgatccacgacgactccctgaccttcaaggaggacatccagaaggcccaggtgtccggccagggcgactccctgcacgagcacatcgccaacctggccggctcccccgccatcaagaagggcatcctgcagaccgtgaaggtggtggacgagctggtgaaggtgatgggccggcacaagcccgagaacatcgtgatcgagatggcccgggagaaccagaccacccagaagggccagaagaactcccgggagcggatgaagcggatcgaggagggcatcaaggagctgggctcccagatcctgaaggagcaccccgtggagaacacccagctgcagaacgagaagctgtacctgtactacctgcagaacggccgggacatgtacgtggaccaggagctggacatcaaccggctgtccgactacgacgtggaccacatcgtgccccagtccttcctgaaggacgactccatcgacaacaaggtgctgacccggtccgacaagaaccggggcaagtccgacaacgtgccctccgaggaggtggtgaagaagatgaagaactactggcggcagctgctgaacgccaagctgatcacccagcggaagttcgacaacctgaccaaggccgagcggggcggcctgtccgagctggacaaggccggcttcatcaagcggcagctggtggagacccggcagatcaccaagcacgtggcccagatcctggactcccggatgaacaccaagtacgacgagaacgacaagctgatccgggaggtgaaggtgatcaccctgaagtccaagctggtgtccgacttccggaaggacttccagttctacaaggtgcgggagatcaacaactaccaccacgcccacgacgcctacctgaacgccgtggtgggcaccgccctgatcaagaagtaccccaagctggagtccgagttcgtgtacggcgactacaaggtgtacgacgtgcggaagatgatcgccaagtccgagcaggagatcggcaaggccaccgccaagtacttcttctactccaacatcatgaacttcttcaagaccgagatcaccctggccaacggcgagatccggaagcggcccctgatcgagaccaacggcgagaccggcgagatcgtgtgggacaagggccgggacttcgccaccgtgcggaaggtgctgtccatgccccaggtgaacatcgtgaagaagaccgaggtgcagaccggcggcttctccaaggagtccatcctgcccaagcggaactccgacaagctgatcgcccggaagaaggactgggaccccaagaagtacggcggcttcgactcccccaccgtggcctactccgtgctggtggtggccaaggtggagaagggcaagtccaagaagctgaagtccgtgaaggagctgctgggcatcaccatcatggagcggtcctccttcgagaagaaccccatcgacttcctggaggccaagggctacaaggaggtgaagaaggacctgatcatcaagctgcccaagtactccctgttcgagctggagaacggccggaagcggatgctggcctccgccggcgagctgcagaagggcaacgagctggccctgccctccaagtacgtgaacttcctgtacctggcctcccactacgagaagctgaagggctcccccgaggacaacgagcagaagcagctgttcgtggagcagcacaagcactacctggacgagatcatcgagcagatctccgagttctccaagcgggtgatcctggccgacgccaacctggacaaggtgctgtccgcctacaacaagcaccgggacaagcccatccgggagcaggccgagaacatcatccacctgttcaccctgaccaacctgggcgcccccgccgccttcaagtacttcgacaccaccatcgaccggaagcggtacacctccaccaaggaggtgctggacgccaccctgatccaccagtccatcaccggcctgtacgagacccggatcgacctgtcccagctgggcggcgacggcggcggctcccccaagaagaagcggaaggtgtga

SEQ ID NO: 805 - RNA, 4839 nt, synthetic construct
  source 1..4839: mol_type = other RNA
atggaggcctcccccgcctccggcccccggcacctgatggacccccacatcttcacctccaacttcaacaacggcatcggccggcacaagacctacctgtgctacgaggtggagcggctggacaacggcacctccgtgaagatggaccagcaccggggcttcctgcacaaccaggccaagaacctgctgtgcggcttctacggccggcacgccgagctgcggttcctggacctggtgccctccctgcagctggaccccgcccagatctaccgggtgacctggttcatctcctggtccccctgcttctcctggggctgcgccggcgaggtgcgggccttcctgcaggagaacacccacgtgcggctgcggatcttcgccgcccggatctacgactacgaccccctgtacaaggaggccctgcagatgctgcgggacgccggcgcccaggtgtccatcatgacctacgacgagttcaagcactgctgggacaccttcgtggaccaccagggctgccccttccagccctgggacggcctggacgagcactcccaggccctgtccggccggctgcgggccatcctgcagaaccagggcaactccggctccgagacccccggcacctccgagtccgccacccccgagtccgacaagaagtactccatcggcctggccatcggcaccaactccgtgggctgggccgtgatcaccgacgagtacaaggtgccctccaagaagttcaaggtgctgggcaacaccgaccggcactccatcaagaagaacctgatcggcgccctgctgttcgactccggcgagaccgccgaggccacccggctgaagcggaccgcccggcggcggtacacccggcggaagaaccggatctgctacctgcaggagatcttctccaacgagatggccaaggtggacgactccttcttccaccggctggaggagtccttcctggtggaggaggacaagaagcacgagcggcaccccatcttcggcaacatcgtggacgaggtggcctaccacgagaagtaccccaccatctaccacctgcggaagaagctggtggactccaccgacaaggccgacctgcggctgatctacctggccctggcccacatgatcaagttccggggccacttcctgatcgagggcgacctgaaccccgacaactccgacgtggacaagctgttcatccagctggtgcagacctacaaccagctgttcgaggagaaccccatcaacgcctccggcgtggacgccaaggccatcctgtccgcccggctgtccaagtcccggcggctggagaacctgatcgcccagctgcccggcgagaagaagaacggcctgttcggcaacctgatcgccctgtccctgggcctgacccccaacttcaagtccaacttcgacctggccgaggacgccaagctgcagctgtccaaggacacctacgacgacgacctggacaacctgctggcccagatcggcgaccagtacgccgacctgttcctggccgccaagaacctgtccgacgccatcctgctgtccgacatcctgcgggtgaacaccgagatcaccaaggcccccctgtccgcctccatgatcaagcggtacgacgagcaccaccaggacctgaccctgctgaaggccctggtgcggcagcagctgcccgagaagtacaaggagatcttcttcgaccagtccaagaacggctacgccggctacatcgacggcggcgcctcccaggaggagttctacaagttcatcaagcccatcctggagaagatggacggcaccgaggagctgctggtgaagctgaaccgggaggacctgctgcggaagcagcggaccttcgacaacggctccatcccccaccagatccacctgggcgagctgcacgccatcctgcggcggcaggaggacttctaccccttcctgaaggacaaccgggagaagatcgagaagatcctgaccttccggatcccctactacgtgggccccctggcccggggcaactcccggttcgcctggatgacccggaagtccgaggagaccatcaccccctggaacttcgaggaggtggtggacaagggcgcctccgcccagtccttcatcgagcggatgaccaacttcgacaagaacctgcccaacgagaaggtgctgcccaagcactccctgctgtacgagtacttcaccgtgtacaacgagctgaccaaggtgaagtacgtgaccgagggcatgcggaagcccgccttcctgtccggcgagcagaagaaggccatcgtggacctgctgttcaagaccaaccggaaggtgaccgtgaagcagctgaaggaggactacttcaagaagatcgagtgcttcgactccgtggagatctccggcgtggaggaccggttcaacgcctccctgggcacctaccacgacctgctgaagatcatcaaggacaaggacttcctggacaacgaggagaacgaggacatcctggaggacatcgtgctgaccctgaccctgttcgaggaccgggagatgatcgaggagcggctgaagacctacgcccacctgttcgacgacaaggtgatgaagcagctgaagcggcggcggtacaccggctggggccggctgtcccggaagctgatcaacggcatccgggacaagcagtccggcaagaccatcctggacttcctgaagtccgacggcttcgccaaccggaacttcatgcagctgatccacgacgactccctgaccttcaaggaggacatccagaaggcccaggtgtccggccagggcgactccctgcacgagcacatcgccaacctggccggctcccccgccatcaagaagggcatcctgcagaccgtgaaggtggtggacgagctggtgaaggtgatgggccggcacaagcccgagaacatcgtgatcgagatggcccgggagaaccagaccacccagaagggccagaagaactcccgggagcggatgaagcggatcgaggagggcatcaaggagctgggctcccagatcctgaaggagcaccccgtggagaacacccagctgcagaacgagaagctgtacctgtactacctgcagaacggccgggacatgtacgtggaccaggagctggacatcaaccggctgtccgactacgacgtggaccacatcgtgccccagtccttcctgaaggacgactccatcgacaacaaggtgctgacccggtccgacaagaaccggggcaagtccgacaacgtgccctccgaggaggtggtgaagaagatgaagaactactggcggcagctgctgaacgccaagctgatcacccagcggaagttcgacaacctgaccaaggccgagcggggcggcctgtccgagctggacaaggccggcttcatcaagcggcagctggtggagacccggcagatcaccaagcacgtggcccagatcctggactcccggatgaacaccaagtacgacgagaacgacaagctgatccgggaggtgaaggtgatcaccctgaagtccaagctggtgtccgacttccggaaggacttccagttctacaaggtgcgggagatcaacaactaccaccacgcccacgacgcctacctgaacgccgtggtgggcaccgccctgatcaagaagtaccccaagctggagtccgagttcgtgtacggcgactacaaggtgtacgacgtgcggaagatgatcgccaagtccgagcaggagatcggcaaggccaccgccaagtacttcttctactccaacatcatgaacttcttcaagaccgagatcaccctggccaacggcgagatccggaagcggcccctgatcgagaccaacggcgagaccggcgagatcgtgtgggacaagggccgggacttcgccaccgtgcggaaggtgctgtccatgccccaggtgaacatcgtgaagaagaccgaggtgcagaccggcggcttctccaaggagtccatcctgcccaagcggaactccgacaagctgatcgcccggaagaaggactgggaccccaagaagtacggcggcttcgactcccccaccgtggcctactccgtgctggtggtggccaaggtggagaagggcaagtccaagaagctgaagtccgtgaaggagctgctgggcatcaccatcatggagcggtcctccttcgagaagaaccccatcgacttcctggaggccaagggctacaaggaggtgaagaaggacctgatcatcaagctgcccaagtactccctgttcgagctggagaacggccggaagcggatgctggcctccgccggcgagctgcagaagggcaacgagctggccctgccctccaagtacgtgaacttcctgtacctggcctcccactacgagaagctgaagggctcccccgaggacaacgagcagaagcagctgttcgtggagcagcacaagcactacctggacgagatcatcgagcagatctccgagttctccaagcgggtgatcctggccgacgccaacctggacaaggtgctgtccgcctacaacaagcaccgggacaagcccatccgggagcaggccgagaacatcatccacctgttcaccctgaccaacctgggcgcccccgccgccttcaagtacttcgacaccaccatcgaccggaagcggtacacctccaccaaggaggtgctggacgccaccctgatccaccagtccatcaccggcctgtacgagacccggatcgacctgtcccagctgggcggcgacggcggcggctcccccaagaagaagcggaaggtgtccgagtccgccacccccgagtccgtgtccggctggcggctgttcaagaagatctcctga

SEQ ID NO: 806 - DNA, 4782 bp, synthetic construct
  source 1..4782: mol_type = other DNA
atggaggcctcccccgcctccggcccccggcacctgatggacccccacatcttcacctccaacttcaacaacggcatcggccggcacaagacctacctgtgctacgaggtggagcggctggacaacggcacctccgtgaagatggaccagcaccggggcttcctgcacaaccaggccaagaacctgctgtgcggcttctacggccggcacgccgagctgcggttcctggacctggtgccctccctgcagctggaccccgcccagatctaccgggtgacctggttcatctcctggtccccctgcttctcctggggctgcgccggcgaggtgcgggccttcctgcaggagaacacccacgtgcggctgcggatcttcgccgcccggatctacgactacgaccccctgtacaaggaggccctgcagatgctgcgggacgccggcgcccaggtgtccatcatgacctacgacgagttcaagcactgctgggacaccttcgtggaccaccagggctgccccttccagccctgggacggcctggacgagcactcccaggccctgtccggccggctgcgggccatcctgcagaaccagggcaactccggctccgagacccccggcacctccgagtccgccacccccgagtccgacaagaagtactccatcggcctggccatcggcaccaactccgtgggctgggccgtgatcaccgacgagtacaaggtgccctccaagaagttcaaggtgctgggcaacaccgaccggcactccatcaagaagaacctgatcggcgccctgctgttcgactccggcgagaccgccgaggccacccggctgaagcggaccgcccggcggcggtacacccggcggaagaaccggatctgctacctgcaggagatcttctccaacgagatggccaaggtggacgactccttcttccaccggctggaggagtccttcctggtggaggaggacaagaagcacgagcggcaccccatcttcggcaacatcgtggacgaggtggcctaccacgagaagtaccccaccatctaccacctgcggaagaagctggtggactccaccgacaaggccgacctgcggctgatctacctggccctggcccacatgatcaagttccggggccacttcctgatcgagggcgacctgaaccccgacaactccgacgtggacaagctgttcatccagctggtgcagacctacaaccagctgttcgaggagaaccccatcaacgcctccggcgtggacgccaaggccatcctgtccgcccggctgtccaagtcccggcggctggagaacctgatcgcccagctgcccggcgagaagaagaacggcctgttcggcaacctgatcgccctgtccctgggcctgacccccaacttcaagtccaacttcgacctggccgaggacgccaagctgcagctgtccaaggacacctacgacgacgacctggacaacctgctggcccagatcggcgaccagtacgccgacctgttcctggccgccaagaacctgtccgacgccatcctgctgtccgacatcctgcgggtgaacaccgagatcaccaaggcccccctgtccgcctccatgatcaagcggtacgacgagcaccaccaggacctgaccctgctgaaggccctggtgcggcagcagctgcccgagaagtacaaggagatcttcttcgaccagtccaagaacggctacgccggctacatcgacggcggcgcctcccaggaggagttctacaagttcatcaagcccatcctggagaagatggacggcaccgaggagctgctggtgaagctgaaccgggaggacctgctgcggaagcagcggaccttcgacaacggctccatcccccaccagatccacctgggcgagctgcacgccatcctgcggcggcaggaggacttctaccccttcctgaaggacaaccgggagaagatcgagaagatcctgaccttccggatcccctactacgtgggccccctggcccggggcaactcccggttcgcctggatgacccggaagtccgaggagaccatcaccccctggaacttcgaggaggtggtggacaagggcgcctccgcccagtccttcatcgagcggatgaccaacttcgacaagaacctgcccaacgagaaggtgctgcccaagcactccctgctgtacgagtacttcaccgtgtacaacgagctgaccaaggtgaagtacgtgaccgagggcatgcggaagcccgccttcctgtccggcgagcagaagaaggccatcgtggacctgctgttcaagaccaaccggaaggtgaccgtgaagcagctgaaggaggactacttcaagaagatcgagtgcttcgactccgtggagatctccggcgtggaggaccggttcaacgcctccctgggcacctaccacgacctgctgaagatcatcaaggacaaggacttcctggacaacgaggagaacgaggacatcctggaggacatcgtgctgaccctgaccctgttcgaggaccgggagatgatcgaggagcggctgaagacctacgcccacctgttcgacgacaaggtgatgaagcagctgaagcggcggcggtacaccggctggggccggctgtcccggaagctgatcaacggcatccgggacaagcagtccggcaagaccatcctggacttcctgaagtccgacggcttcgccaaccggaacttcatgcagctgatccacgacgactccctgaccttcaaggaggacatccagaaggcccaggtgtccggccagggcgactccctgcacgagcacatcgccaacctggccggctcccccgccatcaagaagggcatcctgcagaccgtgaaggtggtggacgagctggtgaaggtgatgggccggcacaagcccgagaacatcgtgatcgagatggcccgggagaaccagaccacccagaagggccagaagaactcccgggagcggatgaagcggatcgaggagggcatcaaggagctgggctcccagatcctgaaggagcaccccgtggagaacacccagctgcagaacgagaagctgtacctgtactacctgcagaacggccgggacatgtacgtggaccaggagctggacatcaaccggctgtccgactacgacgtggaccacatcgtgccccagtccttcctgaaggacgactccatcgacaacaaggtgctgacccggtccgacaagaaccggggcaagtccgacaacgtgccctccgaggaggtggtgaagaagatgaagaactactggcggcagctgctgaacgccaagctgatcacccagcggaagttcgacaacctgaccaaggccgagcggggcggcctgtccgagctggacaaggccggcttcatcaagcggcagctggtggagacccggcagatcaccaagcacgtggcccagatcctggactcccggatgaacaccaagtacgacgagaacgacaagctgatccgggaggtgaaggtgatcaccctgaagtccaagctggtgtccgacttccggaaggacttccagttctacaaggtgcgggagatcaacaactaccaccacgcccacgacgcctacctgaacgccgtggtgggcaccgccctgatcaagaagtaccccaagctggagtccgagttcgtgtacggcgactacaaggtgtacgacgtgcggaagatgatcgccaagtccgagcaggagatcggcaaggccaccgccaagtacttcttctactccaacatcatgaacttcttcaagaccgagatcaccctggccaacggcgagatccggaagcggcccctgatcgagaccaacggcgagaccggcgagatcgtgtgggacaagggccgggacttcgccaccgtgcggaaggtgctgtccatgccccaggtgaacatcgtgaagaagaccgaggtgcagaccggcggcttctccaaggagtccatcctgcccaagcggaactccgacaagctgatcgcccggaagaaggactgggaccccaagaagtacggcggcttcgactcccccaccgtggcctactccgtgctggtggtggccaaggtggagaagggcaagtccaagaagctgaagtccgtgaaggagctgctgggcatcaccatcatggagcggtcctccttcgagaagaaccccatcgacttcctggaggccaagggctacaaggaggtgaagaaggacctgatcatcaagctgcccaagtactccctgttcgagctggagaacggccggaagcggatgctggcctccgccggcgagctgcagaagggcaacgagctggccctgccctccaagtacgtgaacttcctgtacctggcctcccactacgagaagctgaagggctcccccgaggacaacgagcagaagcagctgttcgtggagcagcacaagcactacctggacgagatcatcgagcagatctccgagttctccaagcgggtgatcctggccgacgccaacctggacaaggtgctgtccgcctacaacaagcaccgggacaagcccatccgggagcaggccgagaacatcatccacctgttcaccctgaccaacctgggcgcccccgccgccttcaagtacttcgacaccaccatcgaccggaagcggtacacctccaccaaggaggtgctggacgccaccctgatccaccagtccatcaccggcctgtacgagacccggatcgacctgtcccagctgggcggcgacggcggcggctcccccaagaagaagcggaaggtgtga

SEQ ID NO: 807 - RNA, 291 nt, synthetic construct
  source 1..291: mol_type = other RNA
atgggaccgaagaagaagagaaaggtcggaggaggaagcacaaacctgtcggacatcatcgaaaaggaaacaggaaagcagctggtcatccaggaatcgatcctgatgctgccggaagaagtcgaagaagtcatcggaaacaagccggaatcggacatcctggtccacacagcatacgacgaatcgacagacgaaaacgtcatgctgctgacatcggacgcaccggaatacaagccgtgggcactggtcatccaggactcgaacggagaaaacaagatcaagatgctgtga

SEQ ID NO: 808 - RNA, 324 nt, synthetic construct
  source 1..324: mol_type = other RNA
atgaccaacctgtccgacatcatcgagaaggagaccggcaagcagctggtgatccaggagtccatcctgatgctgcccgaggaggtggaggaggtgatcggcaacaagcccgagtccgacatcctggtgcacaccgcctacgacgagtccaccgacgagaacgtgatgctgctgacctccgacgcccccgagtacaagccctgggccctggtgatccaggactccaacggcgagaacaagatcaagatgctgtccggcggctccaagcggaccgccgacggctccgagttcgagtcccccaagaagaagcggaaggtggagtga

SEQ ID NO: 809 - protein, 1379 aa, synthetic construct; identical to SEQ ID NO: 800

SEQ ID NO: 810 - protein, 1398 aa, synthetic construct
MDKKYSIGLDIGTNSVGWAVITDEYKVPSKKFKVLGNTDRHSIKKNLIGALLFDSGETAEATRLKRTARRRYTRRKNRICYLQEIFSNEMAKVDDSFFHRLEESFLVEEDKKHERHPIFGNIVDEVAYHEKYPTIYHLRKKLVDSTDKADLRLIYLALAHMIKFRGHFLIEGDLNPDNSDVDKLFIQLVQTYNQLFEENPINASGVDAKAILSARLSKSRRLENLIAQLPGEKKNGLFGNLIALSLGLTPNFKSNFDLAEDAKLQLSKDTYDDDLDNLLAQIGDQYADLFLAAKNLSDAILLSDILRVNTEITKAPLSASMIKRYDEHHQDLTLLKALVRQQLPEKYKEIFFDQSKNGYAGYIDGGASQEEFYKFIKPILEKMDGTEELLVKLNREDLLRKQRTFDNGSIPHQIHLGELHAILRRQEDFYPFLKDNREKIEKILTFRIPYYVGPLARGNSRFAWMTRKSEETITPWNFEEVVDKGASAQSFIERMTNFDKNLPNEKVLPKHSLLYEYFTVYNELTKVKYVTEGMRKPAFLSGEQKKAIVDLLFKTNRKVTVKQLKEDYFKKIECFDSVEISGVEDRFNASLGTYHDLLKIIKDKDFLDNEENEDILEDIVLTLTLFEDREMIEERLKTYAHLFDDKVMKQLKRRRYTGWGRLSRKLINGIRDKQSGKTILDFLKSDGFANRNFMQLIHDDSLTFKEDIQKAQVSGQGDSLHEHIANLAGSPAIKKGILQTVKVVDELVKVMGRHKPENIVIEMARENQTTQKGQKNSRERMKRIEEGIKELGSQILKEHPVENTQLQNEKLYLYYLQNGRDMYVDQELDINRLSDYDVDHIVPQSFLKDDSIDNKVLTRSDKNRGKSDNVPSEEVVKKMKNYWRQLLNAKLITQRKFDNLTKAERGGLSELDKAGFIKRQLVETRQITKHVAQILDSRMNTKYDENDKLIREVKVITLKSKLVSDFRKDFQFYKVREINNYHHAHDAYLNAVVGTALIKKYPKLESEFVYGDYKVYDVRKMIAKSEQEIGKATAKYFFYSNIMNFFKTEITLANGEIRKRPLIETNGETGEIVWDKGRDFATVRKVLSMPQVNIVKKTEVQTGGFSKESILPKRNSDKLIARKKDWDPKKYGGFDSPTVAYSVLVVAKVEKGKSKKLKSVKELLGITIMERSSFEKNPIDFLEAKGYKEVKKDLIIKLPKYSLFELENGRKRMLASAGELQKGNELALPSKYVNFLYLASHYEKLKGSPEDNEQKQLFVEQHKHYLDEIIEQISEFSKRVILADANLDKVLSAYNKHRDKPIREQAENIIHLFTLTNLGAPAAFKYFDTTIDRKRYTSTKEVLDATLIHQSITGLYETRIDLSQLGGDGGGSPKKKRKVSESATPESVSGWRLFKKIS

SEQ ID NO: 811 - protein, 1593 aa, synthetic construct
MEASPASGPRHLMDPHIFTSNFNNGIGRHKTYLCYEVERLDNGTSVKMDQHRGFLHNQAKNLLCGFYGRHAELRFLDLVPSLQLDPAQIYRVTWFISWSPCFSWGCAGEVRAFLQENTHVRLRIFAARIYDYDPLYKEALQMLRDAGAQVSIMTYDEFKHCWDTFVDHQGCPFQPWDGLDEHSQALSGRLRAILQNQGNSGSETPGTSESATPESDKKYSIGLAIGTNSVGWAVITDEYKVPSKKFKVLGNTDRHSIKKNLIGALLFDSGETAEATRLKRTARRRYTRRKNRICYLQEIFSNEMAKVDDSFFHRLEESFLVEEDKKHERHPIFGNIVDEVAYHEKYPTIYHLRKKLVDSTDKADLRLIYLALAHMIKFRGHFLIEGDLNPDNSDVDKLFIQLVQTYNQLFEENPINASGVDAKAILSARLSKSRRLENLIAQLPGEKKNGLFGNLIALSLGLTPNFKSNFDLAEDAKLQLSKDTYDDDLDNLLAQIGDQYADLFLAAKNLSDAILLSDILRVNTEITKAPLSASMIKRYDEHHQDLTLLKALVRQQLPEKYKEIFFDQSKNGYAGYIDGGASQEEFYKFIKPILEKMDGTEELLVKLNREDLLRKQRTFDNGSIPHQIHLGELHAILRRQEDFYPFLKDNREKIEKILTFRIPYYVGPLARGNSRFAWMTRKSEETITPWNFEEVVDKGASAQSFIERMTNFDKNLPNEKVLPKHSLLYEYFTVYNELTKVKYVTEGMRKPAFLSGEQKKAIVDLLFKTNRKVTVKQLKEDYFKKIECFDSVEISGVEDRFNASLGTYHDLLKIIKDKDFLDNEENEDILEDIVLTLTLFEDREMIEERLKTYAHLFDDKVMKQLKRRRYTGWGRLSRKLINGIRDKQSGKTILDFLKSDGFANRNFMQLIHDDSLTFKEDIQKAQVSGQGDSLHEHIANLAGSPAIKKGILQTVKVVDELVKVMGRHKPENIVIEMARENQTTQKGQKNSRERMKRIEEGIKELGSQILKEHPVENTQLQNEKLYLYYLQNGRDMYVDQELDINRLSDYDVDHIVPQSFLKDDSIDNKVLTRSDKNRGKSDNVPSEEVVKKMKNYWRQLLNAKLITQRKFDNLTKAERGGLSELDKAGFIKRQLVETRQITKHVAQILDSRMNTKYDENDKLIREVKVITLKSKLVSDFRKDFQFYKVREINNYHHAHDAYLNAVVGTALIKKYPKLESEFVYGDYKVYDVRKMIAKSEQEIGKATAKYFFYSNIMNFFKTEITLANGEIRKRPLIETNGETGEIVWDKGRDFATVRKVLSMPQVNIVKKTEVQTGGFSKESILPKRNSDKLIARKKDWDPKKYGGFDSPTVAYSVLVVAKVEKGKSKKLKSVKELLGITIMERSSFEKNPIDFLEAKGYKEVKKDLIIKLPKYSLFELENGRKRMLASAGELQKGNELALPSKYVNFLYLASHYEKLKGSPEDNEQKQLFVEQHKHYLDEIIEQISEFSKRVILADANLDKVLSAYNKHRDKPIREQAENIIHLFTLTNLGAPAAFKYFDTTIDRKRYTSTKEVLDATLIHQSITGLYETRIDLSQLGGDGGGSPKKKRKV

SEQ ID NO: 812 - protein, 1612 aa, synthetic construct
MEASPASGPRHLMDPHIFTSNFNNGIGRHKTYLCYEVERLDNGTSVKMDQHRGFLHNQAKNLLCGFYGRHAELRFLDLVPSLQLDPAQIYRVTWFISWSPCFSWGCAGEVRAFLQENTHVRLRIFAARIYDYDPLYKEALQMLRDAGAQVSIMTYDEFKHCWDTFVDHQGCPFQPWDGLDEHSQALSGRLRAILQNQGNSGSETPGTSESATPESDKKYSIGLAIGTNSVGWAVITDEYKVPSKKFKVLGNTDRHSIKKNLIGALLFDSGETAEATRLKRTARRRYTRRKNRICYLQEIFSNEMAKVDDSFFHRLEESFLVEEDKKHERHPIFGNIVDEVAYHEKYPTIYHLRKKLVDSTDKADLRLIYLALAHMIKFRGHFLIEGDLNPDNSDVDKLFIQLVQTYNQLFEENPINASGVDAKAILSARLSKSRRLENLIAQLPGEKKNGLFGNLIALSLGLTPNFKSNFDLAEDAKLQLSKDTYDDDLDNLLAQIGDQYADLFLAAKNLSDAILLSDILRVNTEITKAPLSASMIKRYDEHHQDLTLLKALVRQQLPEKYKEIFFDQSKNGYAGYIDGGASQEEFYKFIKPILEKMDGTEELLVKLNREDLLRKQRTFDNGSIPHQIHLGELHAILRRQEDFYPFLKDNREKIEKILTFRIPYYVGPLARGNSRFAWMTRKSEETITPWNFEEVVDKGASAQSFIERMTNFDKNLPNEKVLPKHSLLYEYFTVYNELTKVKYVTEGMRKPAFLSGEQKKAIVDLLFKTNRKVTVKQLKEDYFKKIECFDSVEISGVEDRFNASLGTYHDLLKIIKDKDFLDNEENEDILEDIVLTLTLFEDREMIEERLKTYAHLFDDKVMKQLKRRRYTGWGRLSRKLINGIRDKQSGKTILDFLKSDGFANRNFMQLIHDDSLTFKEDIQKAQVSGQGDSLHEHIANLAGSPAIKKGILQTVKVVDELVKVMGRHKPENIVIEMARENQTTQKGQKNSRERMKRIEEGIKELGSQILKEHPVENTQLQNEKLYLYYLQNGRDMYVDQELDINRLSDYDVDHIVPQSFLKDDSIDNKVLTRSDKNRGKSDNVPSEEVVKKMKNYWRQLLNAKLITQRKFDNLTKAERGGLSELDKAGFIKRQLVETRQITKHVAQILDSRMNTKYDENDKLIREVKVITLKSKLVSDFRKDFQFYKVREINNYHHAHDAYLNAVVGTALIKKYPKLESEFVYGDYKVYDVRKMIAKSEQEIGKATAKYFFYSNIMNFFKTEITLANGEIRKRPLIETNGETGEIVWDKGRDFATVRKVLSMPQVNIVKKTEVQTGGFSKESILPKRNSDKLIARKKDWDPKKYGGFDSPTVAYSVLVVAKVEKGKSKKLKSVKELLGITIMERSSFEKNPIDFLEAKGYKEVKKDLIIKLPKYSLFELENGRKRMLASAGELQKGNELALPSKYVNFLYLASHYEKLKGSPEDNEQKQLFVEQHKHYLDEIIEQISEFSKRVILADANLDKVLSAYNKHRDKPIREQAENIIHLFTLTNLGAPAAFKYFDTTIDRKRYTSTKEVLDATLIHQSITGLYETRIDLSQLGGDGGGSPKKKRKVSESATPESVSGWRLFKKIS

SEQ ID NO: 813 - skipped

SEQ ID NO: 814 - protein, 107 aa, synthetic construct
MTNLSDIIEKETGKQLVIQESILMLPEEVEEVIGNKPESDILVHTAYDESTDENVMLLTSDAPEYKPWALVIQDSNGENKIKMLSGGSKRTADGSEFESPKKKRKVE

SEQ ID NO: 815-816 - skipped (2 entries)

SEQ ID NO: 817 - RNA, 4140 nt, synthetic construct
  source 1..4140: mol_type = other RNA
atggacaagaagtacagcatcggactggacatcggaacaaacagcgtcggatgggcagtcatcacagacgaatacaaggtcccgagcaagaagttcaaggtcctgggaaacacagacagacacagcatcaagaagaacctgatcggagcactgctgttcgacagcggagaaacagcagaagcaacaagactgaagagaacagcaagaagaagatacacaagaagaaagaacagaatctgctacctgcaggaaatcttcagcaacgaaatggcaaaggtcgacgacagcttcttccacagactggaagaaagcttcctggtcgaagaagacaagaagcacgaaagacacccgatcttcggaaacatcgtcgacgaagtcgcataccacgaaaagtacccgacaatctaccacctgagaaagaagctggtcgacagcacagacaaggcagacctgagactgatctacctggcactggcacacatgatcaagttcagaggacacttcctgatcgaaggagacctgaacccggacaacagcgacgtcgacaagctgttcatccagctggtccagacatacaaccagctgttcgaagaaaacccgatcaacgcaagcggagtcgacgcaaaggcaatcctgagcgcaagactgagcaagagcagaagactggaaaacctgatcgcacagctgccgggagaaaagaagaacggactgttcggaaacctgatcgcactgagcctgggactgacaccgaacttcaagagcaacttcgacctggcagaagacgcaaagctgcagctgagcaaggacacatacgacgacgacctggacaacctgctggcacagatcggagaccagtacgcagacctgttcctggcagcaaagaacctgagcgacgcaatcctgctgagcgacatcctgagagtcaacacagaaatcacaaaggcaccgctgagcgcaagcatgatcaagagatacgacgaacaccaccaggacctgacactgctgaaggcactggtcagacagcagctgccggaaaagtacaaggaaatcttcttcgaccagagcaagaacggatacgcaggatacatcgacggaggagcaagccaggaagaattctacaagttcatcaagccgatcctggaaaagatggacggaacagaagaactgctggtcaagctgaacagagaagacctgctgagaaagcagagaacattcgacaacggaagcatcccgcaccagatccacctgggagaactgcacgcaatcctgagaagacaggaagacttctacccgttcctgaaggacaacagagaaaagatcgaaaagatcctgacattcagaatcccgtactacgtcggaccgctggcaagaggaaacagcagattcgcatggatgacaagaaagagcgaagaaacaatcacaccgtggaacttcgaagaagtcgtcgacaagggagcaagcgcacagagcttcatcgaaagaatgacaaacttcgacaagaacctgccgaacgaaaaggtcctgccgaagcacagcctgctgtacgaatacttcacagtctacaacgaactgacaaaggtcaagtacgtcacagaaggaatgagaaagccggcattcctgagcggagaacagaagaaggcaatcgtcgacctgctgttcaagacaaacagaaaggtcacagtcaagcagctgaaggaagactacttcaagaagatcgaatgcttcgacagcgtcgaaatcagcggagtcgaagacagattcaacgcaagcctgggaacataccacgacctgctgaagatcatcaaggacaaggacttcctggacaacgaagaaaacgaagacatcctggaagacatcgtcctgacactgacactgttcgaagacagagaaatgatcgaagaaagactgaagacatacgcacacctgttcgacgacaaggtcatgaagcagctgaagagaagaagatacacaggatggggaagactgagcagaaagctgatcaacggaatcagagacaagcagagcggaaagacaatcctggacttcctgaagagcgacggattcgcaaacagaaacttcatgcagctgatccacgacgacagcctgacattcaaggaagacatccagaaggcacaggtcagcggacagggagacagcctgcacgaacacatcgcaaacctggcaggaagcccggcaatcaagaagggaatcctgcagacagtcaaggtcgtcgacgaactggtcaaggtcatgggaagacacaagccggaaaacatcgtcatcgaaatggcaagagaaaaccagacaacacagaagggacagaagaacagcagagaaagaatgaagagaatcgaagaaggaatcaaggaactgggaagccagatcctgaaggaacacccggtcgaaaacacacagctgcagaacgaaaagctgtacctgtactacctgcagaacggaagagacatgtacgtcgaccaggaactggacatcaacagactgagcgactacgacgtcgaccacatcgtcccgcagagcttcctgaaggacgacagcatcgacaacaaggtcctgacaagaagcgacaagaacagaggaaagagcgacaacgtcccgagcgaagaagtcgtcaagaagatgaagaactactggagacagctgctgaacgcaaagctgatcacacagagaaagttcgacaacctgacaaaggcagagagaggaggactgagcgaactggacaaggcaggattcatcaagagacagctggtcgaaacaagacagatcacaaagcacgtcgcacagatcctggacagcagaatgaacacaaagtacgacgaaaacgacaagctgatcagagaagtcaaggtcatcacactgaagagcaagctggtcagcgacttcagaaaggacttccagttctacaaggtcagagaaatcaacaactaccaccacgcacacgacgcatacctgaacgcagtcgtcggaacagcactgatcaagaagtacccgaagctggaaagcgaattcgtctacggagactacaaggtctacgacgtcagaaagatgatcgcaaagagcgaacaggaaatcggaaaggcaacagcaaagtacttcttctacagcaacatcatgaacttcttcaagacagaaatcacactggcaaacggagaaatcagaaagagaccgctgatcgaaacaaacggagaaacaggagaaatcgtctgggacaagggaagagacttcgcaacagtcagaaaggtcctgagcatgccgcaggtcaacatcgtcaagaagacagaagtccagacaggaggattcagcaaggaaagcatcctgccgaagagaaacagcgacaagctgatcgcaagaaagaaggactgggacccgaagaagtacggaggattcgacagcccgacagtcgcatacagcgtcctggtcgtcgcaaaggtcgaaaagggaaagagcaagaagctgaagagcgtcaaggaactgctgggaatcacaatcatggaaagaagcagcttcgaaaagaacccgatcgacttcctggaagcaaagggatacaaggaagtcaagaaggacctgatcatcaagctgccgaagtacagcctgttcgaactggaaaacggaagaaagagaatgctggcaagcgcaggagaactgcagaagggaaacgaactggcactgccgagcaagtacgtcaacttcctgtacctggcaagccactacgaaaagctgaagggaagcccggaagacaacgaacagaagcagctgttcgtcgaacagcacaagcactacctggacgaaatcatcgaacagatcagcgaattcagcaagagagtcatcctggcagacgcaaacctggacaaggtcctgagcgcatacaacaagcacagagacaagccgatcagagaacaggcagaaaacatcatccacctgttcacactgacaaacctgggagcaccggcagcattcaagtacttcgacacaacaatcgacagaaagagatacacaagcacaaaggaagtcctggacgcaacactgatccaccagagcatcacaggactgtacgaaacaagaatcgacctgagccagctgggaggagacggaggaggaagcccgaagaagaagagaaaggtctag

SEQ ID NO: 818 - RNA, 5043 nt, synthetic construct
  source 1..5043: mol_type = other RNA
atggaagcaagcccggcaagcggaccgagacacctgatggacccgcacatcttcacaagcaacttcaacaacggaatcggaagacacaagacatacctgtgctacgaagtcgaaagactggacaacggaacaagcgtcaagatggaccagcacagaggattcctgcacaaccaggcaaagaacctgctgtgcggattctacggaagacacgcagaactgagattcctggacctggtcccgagcctgcagctggacccggcacagatctacagagtcacatggttcatcagctggagcccgtgcttcagctggggatgcgcaggagaagtcagagcatttctgcaggaaaacacacacgtcagactgagaatcttcgcagcaagaatctacgactacgacccgctgtacaaggaagcactgcagatgctgagagacgcaggagcacaggtcagcatcatgacatacgacgaattcaagcactgctgggacacattcgtcgaccaccagggatgcccgttccagccgtgggacggactggacgaacacagccaggcactgagcggaagactgagagcaatcctgcagaaccagggaaacagcggaagcgaaacaccgggaacaagcgaaagcgcaacaccggaaagcgacaagaagtacagcatcggactggccatcggaacaaacagcgtcggatgggcagtcatcacagacgaatacaaggtcccgagcaagaagttcaaggtcctgggaaacacagacagacacagcatcaagaagaacctgatcggagcactgctgttcgacagcggagaaacagcagaagcaacaagactgaagagaacagcaagaagaagatacacaagaagaaagaacagaatctgctacctgcaggaaatcttcagcaacgaaatggcaaaggtcgacgacagcttcttccacagactggaagaaagcttcctggtcgaagaagacaagaagcacgaaagacacccgatcttcggaaacatcgtcgacgaagtcgcataccacgaaaagtacccgacaatctaccacctgagaaagaagctggtcgacagcacagacaaggcagacctgagactgatctacctggcactggcacacatgatcaagttcagaggacacttcctgatcgaaggagacctgaacccggacaacagcgacgtcgacaagctgttcatccagctggtccagacatacaaccagctgttcgaagaaaacccgatcaacgcaagcggagtcgacgcaaaggcaatcctgagcgcaagactgagcaagagcagaagactggaaaacctgatcgcacagctgccgggagaaaagaagaacggactgttcggaaacctgatcgcactgagcctgggactgacaccgaacttcaagagcaacttcgacctggcagaagacgcaaagctgcagctgagcaaggacacatacgacgacgacctggacaacctgctggcacagatcggagaccagtacgcagacctgttcctggcagcaaagaacctgagcgacgcaatcctgctgagcgacatcctgagagtcaacacagaaatcacaaaggcaccgctgagcgcaagcatgatcaagagatacgacgaacaccaccaggacctgacactgctgaaggcactggtcagacagcagctgccggaaaagtacaaggaaatcttcttcgaccagagcaagaacggatacgcaggatacatcgacggaggagcaagccaggaagaattctacaagttcatcaagccgatcctggaaaagatggacggaacagaagaactgctggtcaagctgaacagagaagacctgctgagaaagcagagaacattcgacaacggaagcatcccgcaccagatccacctgggagaactgcacgcaatcctgagaagacaggaagacttctacccgttcctgaaggacaacagagaaaagatcgaaaagatcctgacattcagaatcccgtactacgtcggaccgctggcaagaggaaacagcagattcgcatggatgacaagaaagagcgaagaaacaatcacaccgtggaacttcgaagaagtcgtcgacaagggagcaagcgcacagagcttcatcgaaagaatgacaaacttcgacaagaacctgccgaacgaaaaggtcctgccgaagcacagcctgctgtacgaatacttcacagtctacaacgaactgacaaaggtcaagtacgtcacagaaggaatgagaaagccggcattcctgagcggagaacagaagaaggcaatcgtcgacctgctgttcaagacaaacagaaaggtcacagtcaagcagctgaaggaagactacttcaagaagatcgaatgcttcgacagcgtcgaaatcagcggagtcgaagacagattcaacgcaagcctgggaacataccacgacctgctgaagatcatcaaggacaaggacttcctggacaacgaagaaaacgaagacatcctggaagacatcgtcctgacactgacactgttcgaagacagagaaatgatcgaagaaagactgaagacatacgcacacctgttcgacgacaaggtcatgaagcagctgaagagaagaagatacacaggatggggaagactgagcagaaagctgatcaacggaatcagagacaagcagagcggaaagacaatcctggacttcctgaagagcgacggattcgcaaacagaaacttcatgcagctgatccacgacgacagcctgacattcaaggaagacatccagaaggcacaggtcagcggacagggagacagcctgcacgaacacatcgcaaacctggcaggaagcccggcaatcaagaagggaatcctgcagacagtcaaggtcgtcgacgaactggtcaaggtcatgggaagacacaagccggaaaacatcgtcatcgaaatggcaagagaaaaccagacaacacagaagggacagaagaacagcagagaaagaatgaagagaatcgaagaaggaatcaaggaactgggaagccagatcctgaaggaacacccggtcgaaaacacacagctgcagaacgaaaagctgtacctgtactacctgcagaacggaagagacatgtacgtcgaccaggaactggacatcaacagactgagcgactacgacgtcgaccacatcgtcccgcagagcttcctgaaggacgacagcatcgacaacaaggtcctgacaagaagcgacaagaacagaggaaagagcgacaacgtcccgagcgaagaagtcgtcaagaagatgaagaactactggagacagctgctgaacgcaaagctgatcacacagagaaagttcgacaacctgacaaaggcagagagaggaggactgagcgaactggacaaggcaggattcatcaagagacagctggtcgaaacaagacagatcacaaagcacgtcgcacagatcctggacagcagaatgaacacaaagtacgacgaaaacgacaagctgatcagagaagtcaaggtcatcacactgaagagcaagctggtcagcgacttcagaaaggacttccagttctacaaggtcagagaaatcaacaactaccaccacgcacacgacgcatacctgaacgcagtcgtcggaacagcactgatcaagaagtacccgaagctggaaagcgaattcgtctacggagactacaaggtctacgacgtcagaaagatgatcgcaaagagcgaacaggaaatcggaaaggcaacagcaaagtacttcttctacagcaacatcatgaacttcttcaagacagaaatcacactggcaaacggagaaatcagaaagagaccgctgatcgaaacaaacggagaaacaggagaaatcgtctgggacaagggaagagacttcgcaacagtcagaaaggtcctgagcatgccgcaggtcaacatcgtcaagaagacagaagtccagacaggaggattcagcaaggaaagcatcctgccgaagagaaacagcgacaagctgatcgcaagaaagaaggactgggacccgaagaagtacggaggattcgacagcccgacagtcgcatacagcgtcctggtcgtcgcaaaggtcgaaaagggaaagagcaagaagctgaagagcgtcaaggaactgctgggaatcacaatcatggaaagaagcagcttcgaaaagaacccgatcgacttcctggaagcaaagggatacaaggaagtcaagaaggacctgatcatcaagctgccgaagtacagcctgttcgaactggaaaacggaagaaagagaatgctggcaagcgcaggagaactgcagaagggaaacgaactggcactgccgagcaagtacgtcaacttcctgtacctggcaagccactacgaaaagctgaagggaagcccggaagacaacgaacagaagcagctgttcgtcgaacagcacaagcactacctggacgaaatcatcgaacagatcagcgaattcagcaagagagtcatcctggcagacgcaaacctggacaaggtcctgagcgcatacaacaagcacagagacaagccgatcagagaacaggcagaaaacatcatccacctgttcacactgacaaacctgggagcaccggcagcattcaagtacttcgacacaacaatcgacagaaagagatacacaagcacaaaggaagtcctggacgcaacactgatccaccagagcatcacaggactgtacgaaacaagaatcgatctgagccagctgggaggagacagcggaggaagcacaaacctgagcgacatcatcgaaaaggaaacaggaaagcagctggtcatccaggaaagcatcctgatgctgccggaagaagtcgaagaagtcatcggaaacaagccggaaagcgacatcctggtccacacagcatacgacgaaagcacagacgaaaacgtcatgctgctgacaagcgacgcaccggaatacaagccgtgggcactggtcatccaggacagcaacggagaaaacaagatcaagatgctgagcggaggaagcccgaagaagaagagaaaggtctaa

SEQ ID NO: 819 - RNA, 291 nt, synthetic construct; identical to SEQ ID NO: 807
  source 1..291: mol_type = other RNA

SEQ ID NO: 820 - skipped

SEQ ID NO: 821 - RNA, 887 nt, synthetic construct
  source 1..887: mol_type = other RNA
gggaagctcagaataaacgctcaactttggccggatctgccaccatgaccaacctgtccgacatcatcgagaaggagaccggcaagcagctggtgatccaggagtccatcctgatgctgcccgaggaggtggaggaggtgatcggcaacaagcccgagtccgacatcctggtgcacaccgcctacgacgagtccaccgacgagaacgtgatgctgctgacctccgacgcccccgagtacaagccctgggccctggtgatccaggactccaacggcgagaacaagatcaagatgctgtccggcggctccaagcggaccgccgacggctccgagttcgagtcccccaagaagaagcggaaggtggagtgatagctagcaccagcctcaagaacacccgaatggagtctctaagctacataataccaacttacactttacaaaatgttgtcccccaaaatgtagccattcgtatctgctcctaataaaaagaaagtttcttcacattctctcgagaaaaaaaaaaaatggaaaaaaaaaaaacggaaaaaaaaaaaaggtaaaaaaaaaaaatataaaaaaaaaaaacataaaaaaaaaaaacgaaaaaaaaaaaacgtaaaaaaaaaaaactcaaaaaaaaaaaagataaaaaaaaaaaacctaaaaaaaaaaaatgtaaaaaaaaaaaagggaaaaaaaaaaaacgcaaaaaaaaaaaacacaaaaaaaaaaaatgcaaaaaaaaaaaatcgaaaaaaaaaaaatctaaaaaaaaaaaacgaaaaaaaaaaaacccaaaaaaaaaaaagacaaaaaaaaaaaatagaaaaaaaaaaaagttaaaaaaaaaaaactgaaaaaaaaaaaatttaaaaaaaaaaaatctag

SEQ ID NO: 822 - RNA, 4563 nt, synthetic construct
  source 1..4563: mol_type = other RNA
gggaagctcagaataaacgctcaactttggccggatctgccaccatggacggctccggcggcggctcccccaagaagaagcggaaggtggaggacaagcggcccgccgccaccaagaaggccggccaggccaagaagaagaagggcggctccggcggcggcgaggcctcccccgcctccggcccccggcacctgatggacccccacatcttcacctccaacttcaacaacggcatcggccggcacaagacctacctgtgctacgaggtggagcggctggacaacggcacctccgtgaagatggaccagcaccggggcttcctgcacaaccaggccaagaacctgctgtgcggcttctacggccggcacgccgagctgcggttcctggacctggtgccctccctgcagctggaccccgcccagatctaccgggtgacctggttcatctcctggtccccctgcttctcctggggctgcgccggcgaggtgcgggccttcctgcaggagaacacccacgtgcggctgcggatcttcgccgcccggatctacgactacgaccccctgtacaaggaggccctgcagatgctgcgggacgccggcgcccaggtgtccatcatgacctacgacgagttcaagcactgctgggacaccttcgtggaccaccagggctgccccttccagccctgggacggcctggacgagcactcccaggccctgtccggccggctgcgggccatcctgcagaaccagggcaactccggctccgagacccccggcacctccgagtccgccacccccgagtccgcagcgttcaaaccaaatcccatcaactacatcctgggcctggccatcggcatcgcctccgtgggctgggccatggtggagatcgacgaggaggagaaccccatccggctgatcgacctgggcgtgcgggtgttcgagcgggccgaggtgcccaagaccggcgactccctggccatggcccggcggctggcccggtccgtgcggcggctgacccggcggcgggcccaccggctgctgcgggcccggcggctgctgaagcgggagggcgtgctgcaggccgccgacttcgacgagaacggcctgatcaagtccctgcccaacaccccctggcagctgcgggccgccgccctggaccggaagctgacccccctggagtggtccgccgtgctgctgcacctgatcaagcaccggggctacctgtcccagcggaagaacgagggcgagaccgccgacaaggagctgggcgccctgctgaagggcgtggccaacaacgcccacgccctgcagaccggcgacttccggacccccgccgagctggccctgaacaagttcgagaaggagtccggccacatccggaaccagcggggcgactactcccacaccttctcccggaaggacctgcaggccgagctgatcctgctgttcgagaagcagaaggagttcggcaacccccacgtgtccggcggcctgaaggagggcatcgagaccctgctgatgacccagcggcccgccctgtccggcgacgccgtgcagaagatgctgggccactgcaccttcgagcccgccgagcccaaggccgccaagaacacctacaccgccgagcggttcatctggctgaccaagctgaacaacctgcggatcctggagcagggctccgagcggcccctgaccgacaccgagcgggccaccctgatggacgagccctaccggaagtccaagctgacctacgcccaggcccggaagctgctgggcctggaggacaccgccttcttcaagggcctgcggtacggcaaggacaacgccgaggcctccaccctgatggagatgaaggcctaccacgccatctcccgggccctggagaaggagggcctgaaggacaagaagtcccccctgaacctgtcctccgagctgcaggacgagatcggcaccgccttctccctgttcaagaccgacgaggacatcaccggccggctgaaggaccgggtgcagcccgagatcctggaggccctgctgaagcacatctccttcgacaagttcgtgcagatctccctgaaggccctgcggcggatcgtgcccctgatggagcagggcaagcggtacgacgaggcctgcgccgagatctacggcgaccactacggcaagaagaacaccgaggagaagatctacctgccccccatccccgccgacgagatccggaaccccgtggtgctgcgggccctgtcccaggcccggaaggtgatcaacggcgtggtgcggcggtacggctcccccgcccggatccacatcgagaccgcccgggaggtgggcaagtccttcaaggaccggaaggagatcgagaagcggcaggaggagaaccggaaggaccgggagaaggccgccgccaagttccgggagtacttccccaacttcgtgggcgagcccaagtccaaggacatcctgaagctgcggctgtacgagcagcagcacggcaagtgcctgtactccggcaaggagatcaacctggtgcggctgaacgagaagggctacgtggagatcgaccacgccctgcccttctcccggacctgggacgactccttcaacaacaaggtgctggtgctgggctccgagaaccagaacaagggcaaccagaccccctacgagtacttcaacggcaaggacaactcccgggagtggcaggagttcaaggcccgggtggagacctcccggttcccccggtccaagaagcagcggatcctgctgcagaagttcgacgaggacggcttcaaggagtgcaacctgaacgacacccggtacgtgaaccgcttcctgtgccagttcgtggccgaccacatcctgctgaccggcaagggcaagcggcgggtgttcgcctccaacggccagatcaccaacctgctgcggggcttctggggcctgcggaaggtgcgggccgagaacgaccggcaccacgccctggacgccgtggtggtggcctgctccaccgtggccatgcagcagaagatcacccggttcgtgcggtacaaggagatgaacgccttcgacggcaagaccatcgacaaggagaccggcaaggtgctgcaccagaagacccacttcccccagccctgggagttcttcgcccaggaggtgatgatccgggtgttcggcaagcccgacggcaagcccgagttcgaggaggccgacacccccgagaagctgcggaccctgctggccgagaagctgtcctcccggcccgaggccgtgcacgagtacgtgacccccctgttcgtgtcccgggcccccaaccggaagatgtccggcgcccacaaggacaccctgcggtccgccaagcggttcgtgaagcacaacgagaagatctccgtgaagcgggtgtggctgaccgagatcaagctggccgacctggagaacatggtgaactacaagaacggccgggagatcgagctgtacgaggccctgaaggcccggctggaggcctacggcggcaacgccaagcaggccttcgaccccaaggacaaccccttctacaagaagggcggccagctggtgaaggccgtgcgggtggagaagacccaggagtccggcgtgctgctgaacaagaagaacgcctacaccatcgccgacaacggcgacatggtgcgggtggacgtgttctgcaaggtggacaagaagggcaagaaccagtacttcatcgtgcccatctacgcctggcaggtggccgagaacatcctgcccgacatcgactgcaagggctaccggatcgacgactcctacaccttctgcttctccctgcacaagtacgacctgatcgccttccagaaggacgagaagtccaaggtggagttcgcctactacatcaactgcgactcctccaacggccggttctacctggcctggcacgacaagggctccaaggagcagcagttccggatctccacccagaacctggtgctgatccagaagtaccaggtgaacgagctgggcaaggagatccggccctgccggctgaagaagcggccccccgtgcggtagtgactagcaccagcctcaagaacacccgaatggagtctctaagctacataataccaacttacactttacaaaatgttgtcccccaaaatgtagccattcgtatctgctcctaataaaaagaaagtttcttcacattctctcgagaaaaaaaaaaaatggaaaaaaaaaaaacggaaaaaaaaaaaggtaaaaaaaaaaaatataaaaaaaaaaacataaaaaaaaaaaacgaaaaaaaaaaaacgtaaaaaaaaaaaactcaaaaaaaaaaagataaaaaaaaaaaacctaaaaaaaaaaaatgtaaaaaaaaaaaagggaaaaaaaaaaacgcaaaaaaaaaaaacacaaaaaaaaaaaatgcaaaaaaaaaaaatcgaaaaaaaaaaaatctaaaaaaaaaaaacgaaaaaaaaaaaacccaaaaaaaaaaaagacaaaaaaaaaaaatagaaaaaaaaaaagttaaaaaaaaaaaactgaaaaaaaaaaaatttaaaaaaaaaaaatctag

SEQ ID NO: 823 - DNA, 3312 bp, synthetic construct
  source 1..3312: mol_type = other DNA
atggcagcattcaagccgaactcgatcaactacatcctgggactggacatcggaatcgcatcggtcggatgggcaatggtcgaaatcgacgaagaagaaaacccgatcagactgatcgacctgggagtcagagtcttcgaaagagcagaagtcccgaagacaggagactcgctggcaatggcaagaagactggcaagatcggtcagaagactgacaagaagaagagcacacagactgctgagaacaagaagactgctgaagagagaaggagtcctgcaggcagcaaacttcgacgaaaacggactgatcaagtcgctgccgaacacaccgtggcagctgagagcagcagcactggacagaaagctgacaccgctggaatggtcggcagtcctgctgcacctgatcaagcacagaggatacctgtcgcagagaaagaacgaaggagaaacagcagacaaggaactgggagcactgctgaagggagtcgcaggaaacgcacacgcactgcagacaggagacttcagaacaccggcagaactggcactgaacaagttcgaaaaggaatcgggacacatcagaaaccagagatcggactactcgcacacattctcgagaaaggacctgcaggcagaactgatcctgctgttcgaaaagcagaaggaattcggaaacccgcacgtctcgggaggactgaaggaaggaatcgaaacactgctgatgacacagagaccggcactgtcgggagacgcagtccagaagatgctgggacactgcacattcgaaccggcagaaccgaaggcagcaaagaacacatacacagcagaaagattcatctggctgacaaagctgaacaacctgagaatcctggaacagggatcggaaagaccgctgacagacacagaaagagcaacactgatggacgaaccgtacagaaagtcgaagctgacatacgcacaggcaagaaagctgctgggactggaagacacagcattcttcaagggactgagatacggaaaggacaacgcagaagcatcgacactgatggaaatgaaggcataccacgcaatctcgagagcactggaaaaggaaggactgaaggacaagaagtcgccgctgaacctgtcgccggaactgcaggacgaaatcggaacagcattctcgctgttcaagacagacgaagacatcacaggaagactgaaggacagaatccagccggaaatcctggaagcactgctgaagcacatctcgttcgacaagttcgtccagatctcgctgaaggcactgagaagaatcgtcccgctgatggaacagggaaagagatacgacgaagcatgcgcagaaatctacggagaccactacggaaagaagaacacagaagaaaagatctacctgccgccgatcccggcagacgaaatcagaaacccggtcgtcctgagagcactgtcgcaggcaagaaaggtcatcaacggagtcgtcagaagatacggatcgccggcaagaatccacatcgaaacagcaagagaagtcggaaagtcgttcaaggacagaaaggaaatcgaaaagagacaggaagaaaacagaaaggacagagaaaaggcagcagcaaagttcagagaatacttcccgaacttcgtcggagaaccgaagtcgaaggacatcctgaagctgagactgtacgaacagcagcacggaaagtgcctgtactcgggaaaggaaatcaacctgggaagactgaacgaaaagggatacgtcgaaatcgaccacgcactgccgttctcgagaacatgggacgactcgttcaacaacaaggtcctggtcctgggatcggaaaaccagaacaagggaaaccagacaccgtacgaatacttcaacggaaaggacaactcgagagaatggcaggaattcaaggcaagagtcgaaacatcgagattcccgagatcgaagaagcagagaatcctgctgcagaagttcgacgaagacggattcaaggaaagaaacctgaacgacacaagatacgtcaacagattcctgtgccagttcgtcgcagacagaatgagactgacaggaaagggaaagaagagagtcttcgcatcgaacggacagatcacaaacctgctgagaggattctggggactgagaaaggtcagagcagaaaacgacagacaccacgcactggacgcagtcgtcgtcgcatgctcgacagtcgcaatgcagcagaagatcacaagattcgtcagatacaaggaaatgaacgcattcgacggaaagacaatcgacaaggaaacaggagaagtcctgcaccagaagacacacttcccgcagccgtgggaattcttcgcacaggaagtcatgatcagagtcttcggaaagccggacggaaagccggaattcgaagaagcagacacactggaaaagctgagaacactgctggcagaaaagctgtcgtcgagaccggaagcagtccacgaatacgtcacaccgctgttcgtctcgagagcaccgaacagaaagatgtcgggacagggacacatggaaacagtcaagtcggcaaagagactggacgaaggagtctcggtcctgagagtcccgctgacacagctgaagctgaaggacctggaaaagatggtcaacagagaaagagaaccgaagctgtacgaagcactgaaggcaagactggaagcacacaaggacgacccggcaaaggcattcgcagaaccgttctacaagtacgacaaggcaggaaacagaacacagcaggtcaaggcagtcagagtcgaacaggtccagaagacaggagtctgggtcagaaaccacaacggaatcgcagacaacgcaacaatggtcagagtagacgtcttcgaaaagggagacaagtactacctggtcccgatctactcgtggcaggtcgcaaagggaatcctgccggacagagcagtcgtccagggaaaggacgaagaagactggcagctgatcgacgactcgttcaacttcaagttctcgctgcacccgaacgacctggtcgaagtcatcacaaagaaggcaagaatgttcggatacttcgcatcgtgccacagaggaacaggaaacatcaacatcagaatccacgacctggaccacaagatcggaaagaacggaatcctggaaggaatcggagtcaagacagcactgtcgttccagaagtaccagatcgacgaactgggaaaggaaatcagaccgtgcagactgaagaagagaccgccggtcagatccggaaagagaacagcagacggatcggaattcgaatcgccgaagaagaagagaaaggtcgaatga

SEQ ID NO: 824 - DNA, 327 bp, synthetic construct
  source 1..327: mol_type = other DNA
atgaccaacctgtccgacatcatcgagaaggagaccggcaagcagctggtgatccaggagtccatcctgatgctgcccgaggaggtggaggaggtgatcggcaacaagcccgagtccgacatcctggtgcacaccgcctacgacgagtccaccgacgagaacgtgatgctgctgacctccgacgcccccgagtacaagccctgggccctggtgatccaggactccaacggcgagaacaagatcaagatgctgtccggcggctccaagcggaccgccgacggctccgagttcgagtcccccaagaagaagcggaaggtggagtgatag

SEQ ID NO: 825 - RNA, 3921 nt, synthetic construct
  source 1..3921: mol_type = other RNA
gggaagctcagaataaacgctcaactttggccggatctgccaccatggacggctccggcggcggctcccccaagaagaagcggaaggtggaggacaagcggcccgccgccaccaagaaggccggccaggccaagaagaagaagggcggctccggcggcggcgccgccttcaagcccaaccccatcaactacatcctgggcctggacatcggcatcgcctccgtgggctgggccatggtggagatcgacgaggaggagaaccccatccggctgatcgacctgggcgtgcgggtgttcgagcgggccgaggtgcccaagaccggcgactccctggccatggcccggcggctggcccggtccgtgcggcggctgacccggcggcgggcccaccggctgctgcgggcccggcggctgctgaagcgggagggcgtgctgcaggccgccgacttcgacgagaacggcctgatcaagtccctgcccaacaccccctggcagctgcgggccgccgccctggaccggaagctgacccccctggagtggtccgccgtgctgctgcacctgatcaagcaccggggctacctgtcccagcggaagaacgagggcgagaccgccgacaaggagctgggcgccctgctgaagggcgtggccaacaacgcccacgccctgcagaccggcgacttccggacccccgccgagctggccctgaacaagttcgagaaggagtccggccacatccggaaccagcggggcgactactcccacaccttctcccggaaggacctgcaggccgagctgatcctgctgttcgagaagcagaaggagttcggcaacccccacgtgtccggcggcctgaaggagggcatcgagaccctgctgatgacccagcggcccgccctgtccggcgacgccgtgcagaagatgctgggccactgcaccttcgagcccgccgagcccaaggccgccaagaacacctacaccgccgagcggttcatctggctgaccaagctgaacaacctgcggatcctggagcagggctccgagcggcccctgaccgacaccgagcgggccaccctgatggacgagccctaccggaagtccaagctgacctacgcccaggcccggaagctgctgggcctggaggacaccgccttcttcaagggcctgcggtacggcaaggacaacgccgaggcctccaccctgatggagatgaaggcctaccacgccatctcccgggccctggagaaggagggcctgaaggacaagaagtcccccctgaacctgtcctccgagctgcaggacgagatcggcaccgccttctccctgttcaagaccgacgaggacatcaccggccggctgaaggaccgggtgcagcccgagatcctggaggccctgctgaagcacatctccttcgacaagttcgtgcagatctccctgaaggccctgcggcggatcgtgcccctgatggagcagggcaagcggtacgacgaggcctgcgccgagatctacggcgaccactacggcaagaagaacaccgaggagaagatctacctgccccccatccccgccgacgagatccggaaccccgtggtgctgcgggccctgtcccaggcccggaaggtgatcaacggcgtggtgcggcggtacggctcccccgcccggatccacatcgagaccgcccgggaggtgggcaagtccttcaaggaccggaaggagatcgagaagcggcaggaggagaaccggaaggaccgggagaaggccgccgccaagttccgggagtacttccccaacttcgtgggcgagcccaagtccaaggacatcctgaagctgcggctgtacgagcagcagcacggcaagtgcctgtactccggcaaggagatcaacctggtgcggctgaacgagaagggctacgtggagatcgaccacgccctgcccttctcccggacctgggacgactccttcaacaacaaggtgctggtgctgggctccgagaaccagaacaagggcaaccagaccccctacgagtacttcaacggcaaggacaactcccgggagtggcaggagttcaaggcccgggtggagacctcccggttcccccggtccaagaagcagcggatcctgctgcagaagttcgacgaggacggcttcaaggagtgcaacctgaacgacacccggtacgtgaaccggttcctgtgccagttcgtggccgaccacatcctgctgaccggcaagggcaagcggcgggtgttcgcctccaacggccagatcaccaacctgctgcggggcttctggggcctgcggaaggtgcgggccgagaacgaccggcaccacgccctggacgccgtggtggtggcctgctccaccgtggccatgcagcagaagatcacccggttcgtgcggtacaaggagatgaacgccttcgacggcaagaccatcgacaaggagaccggcaaggtgctgcaccagaagacccacttcccccagccctgggagttcttcgcccaggaggtgatgatccgggtgttcggcaagcccgacggcaagcccgagttcgaggaggccgacacccccgagaagctgcggaccctgctggccgagaagctgtcctcccggcccgaggccgtgcacgagtacgtgacccccctgttcgtgtcccgggcccccaaccggaagatgtccggcgcccacaaggacaccctgcggtccgccaagcggttcgtgaagcacaacgagaagatctccgtgaagcgggtgtggctgaccgagatcaagctggccgacctggagaacatggtgaactacaagaacggccgggagatcgagctgtacgaggccctgaaggcccggctggaggcctacggcggcaacgccaagcaggccttcgaccccaaggacaaccccttctacaagaagggcggccagctggtgaaggccgtgcgggtggagaagacccaggagtccggcgtgctgctgaacaagaagaacgcctacaccatcgccgacaacggcgacatggtgcgggtggacgtgttctgcaaggtggacaagaagggcaagaaccagtacttcatcgtgcccatctacgcctggcaggtggccgagaacatcctgcccgacatcgactgcaagggctaccggatcgacgactcctacaccttctgcttctccctgcacaagtacgacctgatcgccttccagaaggacgagaagtccaaggtggagttcgcctactacatcaactgcgactcctccaacggccggttctacctggcctggcacgacaagggctccaaggagcagcagttccggatctccacccagaacctggtgctgatccagaagtaccaggtgaacgagctgggcaaggagatccggccctgccggctgaagaagcggccccccgtgcggtagctagcaccagcctcaagaacacccgaatggagtctctaagctacataataccaacttacactttacaaaatgttgtcccccaaaatgtagccattcgtatctgctcctaataaaaagaaagtttcttcacattctctcgagaaaaaaaaaaaatggaaaaaaaaaaaacggaaaaaaaaaaaaggtaaaaaaaaaaaatataaaaaaaaaaaacataaaaaaaaaaaacgaaaaaaaaaaaacgtaaaaaaaaaaaactcaaaaaaaaaaagataaaaaaaaaaaacctaaaaaaaaaaaatgtaaaaaaaaaaaagggaaaaaaaaaaaacgcaaaaaaaaaaaacacaaaaaaaaaaaatgcaaaaaaaaaaaatcgaaaaaaaaaaaatctaaaaaaaaaaaacgaaaaaaaaaaaacccaaaaaaaaaaaagacaaaaaaaaaaaatagaaaaaaaaaaagttaaaaaaaaaaaactgaaaaaaaaaaaatttaaaaaaaaaaaatctag

SEQ ID NO: 826 - RNA, 3980 nt, synthetic construct
  source 1..3980: mol_type = other RNA
gggaagctcagaataaacgctcaactttggccggatctgccaccatggacggctccggcggcggctcccccaagaagaagcggaaggtggaggacaagcggcccgccgccaccaagaaggccggccaggccaagaagaagaagggcggctccggcggcggcgccgccttcaagcccaaccccatcaactacatcctgggcctggacatcggcatcgcctccgtgggctgggccatggtggagatcgacgaggaggagaaccccatccggctgatcgacctgggcgtgcgggtgttcgagcgggccgaggtgcccaagaccggcgactccctggccatggcccggcggctggcccggtccgtgcggcggctgacccggcggcgggcccaccggctgctgcgggcccggcggctgctgaagcgggagggcgtgctgcaggccgccgacttcgacgagaacggcctgatcaagtccctgcccaacaccccctggcagctgcgggccgccgccctggaccggaagctgacccccctggagtggtccgccgtgctgctgcacctgatcaagcaccggggctacctgtcccagcggaagaacgagggcgagaccgccgacaaggagctgggcgccctgctgaagggcgtggccaacaacgcccacgccctgcagaccggcgacttccggacccccgccgagctggccctgaacaagttcgagaaggagtccggccacatccggaaccagcggggcgactactcccacaccttctcccggaaggacctgcaggccgagctgatcctgctgttcgagaagcagaaggagttcggcaacccccacgtgtccggcggcctgaaggagggcatcgagaccctgctgatgacccagcggcccgccctgtccggcgacgccgtgcagaagatgctgggccactgcaccttcgagcccgccgagcccaaggccgccaagaacacctacaccgccgagcggttcatctggctgaccaagctgaacaacctgcggatcctggagcagggctccgagcggcccctgaccgacaccgagcgggccaccctgatggacgagccctaccggaagtccaagctgacctacgcccaggcccggaagctgctgggcctggaggacaccgccttcttcaagggcctgcggtacggcaaggacaacgccgaggcctccaccctgatggagatgaaggcctaccacgccatctcccgggccctggagaaggagggcctgaaggacaagaagtcccccctgaacctgtcctccgagctgcaggacgagatcggcaccgccttctccctgttcaagaccgacgaggacatcaccggccggctgaaggaccgggtgcagcccgagatcctggaggccctgctgaagcacatctccttcgacaagttcgtgcagatctccctgaaggccctgcggcggatcgtgcccctgatggagcagggcaagcggtacgacgaggcctgcgccgagatctacggcgaccactacggcaagaagaacaccgaggagaagatctacctgccccccatccccgccgacgagatccggaaccccgtggtgctgcgggccctgtcccaggcccggaaggtgatcaacggcgtggtgcggcggtacggctcccccgcccggatccacatcgagaccgcccgggaggtgggcaagtccttcaaggaccggaaggagatcgagaagcggcaggaggagaaccggaaggaccgggagaaggccgccgccaagttccgggagtacttccccaacttcgtgggcgagcccaagtccaaggacatcctgaagctgcggctgtacgagcagcagcacggcaagtgcctgtactccggcaaggagatcaacctggtgcggctgaacgagaagggctacgtggagatcgaccacgccctgcccttctcccggacctgggacgactccttcaacaacaaggtgctggtgctgggctccgagaaccagaacaagggcaaccagaccccctacgagtacttcaacggcaaggacaactcccgggagtggcaggagttcaaggcccgggtggagacctcccggttcccccggtccaagaagcagcggatcctgctgcagaagttcgacgaggacggcttcaaggagtgcaacctgaacgacacccggtacgtgaaccggttcctgtgccagttcgtggccgaccacatcctgctgaccggcaagggcaagcggcgggtgttcgcctccaacggccagatcaccaacctgctgcggggcttctggggcctgcggaaggtgcgggccgagaacgaccggcaccacgccctggacgccgtggtggtggcctgctccaccgtggccatgcagcagaagatcacccggttcgtgcggtacaaggagatgaacgccttcgacggcaagaccatcgacaaggagaccggcaaggtgctgcaccagaagacccacttcccccagccctgggagttcttcgcccaggaggtgatgatccgggtgttcggcaagcccgacggcaagcccgagttcgaggaggccgacacccccgagaagctgcggaccctgctggccgagaagctgtcctcccggcccgaggccgtgcacgagtacgtgacccccctgttcgtgtcccgggcccccaaccggaagatgtccggcgcccacaaggacaccctgcggtccgccaagcggttcgtgaagcacaacgagaagatctccgtgaagcgggtgtggctgaccgagatcaagctggccgacctggagaacatggtgaactacaagaacggccgggagatcgagctgtacgaggccctgaaggcccggctggaggcctacggcggcaacgccaagcaggccttcgaccccaaggacaaccccttctacaagaagggcggccagctggtgaaggccgtgcgggtggagaagacccaggagtccggcgtgctgctgaacaagaagaacgcctacaccatcgccgacaacggcgacatggtgcgggtggacgtgttctgcaaggtggacaagaagggcaagaaccagtacttcatcgtgcccatctacgcctggcaggtggccgagaacatcctgcccgacatcgactgcaagggctaccggatcgacgactcctacaccttctgcttctccctgcacaagtacgacctgatcgccttccagaaggacgagaagtccaaggtggagttcgcctactacatcaactgcgactcctccaacggccggttctacctggcctggcacgacaagggctccaaggagcagcagttccggatctccacccagaacctggtgctgatccagaagtaccaggtgaacgagctgggcaaggagatccggccctgccggctgaagaagcggccccccgtgcggtccgagtccgccacccccgagtccgtgtccggctggcggctgttcaagaagatctcctagctagcaccagcctcaagaacacccgaatggagtctctaagctacataataccaacttacactttacaaaatgttgtcccccaaaatgtagccattcgtatctgctcctaataaaaagaaagtttcttcacattctctcgagaaaaaaaaaaaatggaaaaaaaaaaaacggaaaaaaaaaaaaggtaaaaaaaaaaaatataaaaaaaaaaaacataaaaaaaaaaaacgaaaaaaaaaaaacgtaaaaaaaaaaaactcaaaaaaaaaaaagataaaaaaaaaaaacctaaaaaaaaaaaatgtaaaaaaaaaaaagggaaaaaaaaaaaacgcaaaaaaaaaaaacacaaaaaaaaaaaatgcaaaaaaaaaaaatcgaaaaaaaaaaaatctaaaaaaaaaaaacgaaaaaaaaaaaacccaaaaaaaaaaaagacaaaaaaaaaaaatagaaaaaaaaaaaagttaaaaaaaaaaaactgaaaaaaaaaaaatttaaaaaaaaaaaatctag

SEQ ID NO: 827 - DNA, 4140 bp, synthetic construct; identical to SEQ ID NO: 802
  source 1..4140: mol_type = other DNA

SEQ ID NO: 828 - DNA, 4184 bp, synthetic construct
  source 1..4184: mol_type = other DNA
aagctcagaataaacgctcaactttggccggatctgccaccatggacggctccggcggcggctcccccaagaagaagcggaaggtggaggacaagcggcccgccgccaccaagaaggccggccaggccaagaagaagaagggcggctccggcggcggcgaggcctcccccgcctccggcccccggcacctgatggacccccacatcttcacctccaacttcaacaacggcatcggccggcacaagacctacctgtgctacgaggtggagcggctggacaacggcacctccgtgaagatggaccagcaccggggcttcctgcacaaccaggccaagaacctgctgtgcggcttctacggccggcacgccgagctgcggttcctggacctggtgccctccctgcagctggaccccgcccagatctaccgggtgacctggttcatctcctggtccccctgcttctcctggggctgcgccggcgaggtgcgggccttcctgcaggagaacacccacgtgcggctgcggatcttcgccgcccggatctacgactacgaccccctgtacaaggaggccctgcagatgctgcgggacgccggcgcccaggtgtccatcatgacctacgacgagttcaagcactgctgggacaccttcgtggaccaccagggctgccccttccagccctgggacggcctggacgagcactcccaggccctgtccggccggctgcgggccatcctgcagaaccagggcaactccggctccgagacccccggcacctccgagtccgccacccccgagtccgcagcgttcaaaccaaatcccatcaactacatcctgggcctggccatcggcatcgcctccgtgggctgggccatggtggagatcgacgaggaggagaaccccatccggctgatcgacctgggcgtgcgggtgttcgagcgggccgaggtgcccaagaccggcgactccctggccatggcccggcggctggcccggtccgtgcggcggctgacccggcggcgggcccaccggctgctgcgggcccggcggctgctgaagcgggagggcgtgctgcaggccgccgacttcgacgagaacggcctgatcaagtccctgcccaacaccccctggcagctgcgggccgccgccctggaccggaagctgacccccctggagtggtccgccgtgctgctgcacctgatcaagcaccggggctacctgtcccagcggaagaacgagggcgagaccgccgacaaggagctgggcgccctgctgaagggcgtggccaacaacgcccacgccctgcagaccggcgacttccggacccccgccgagctggccctgaacaagttcgagaaggagtccggccacatccggaaccagcggggcgactactcccacaccttctcccggaaggacctgcaggccgagctgatcctgctgttcgagaagcagaaggagttcggcaacccccacgtgtccggcggcctgaaggagggcatcgagaccctgctgatgacccagcggcccgccctgtccggcgacgccgtgcagaagatgctgggccactgcaccttcgagcccgccgagcccaaggccgccaagaacacctacaccgccgagcggttcatctggctgaccaagctgaacaacctgcggatcctggagcagggctccgagcggcccctgaccgacaccgagcgggccaccctgatggacgagccctaccggaagtccaagctgacctacgcccaggcccggaagctgctgggcctggaggacaccgccttcttcaagggcctgcggtacggcaaggacaacgccgaggcctccaccctgatggagatgaaggcctaccacgccatctcccgggccctggagaaggagggcctgaaggacaagaagtcccccctgaacctgtcctccgagctgcaggacgagatcggcaccgccttctccctgttcaagaccgacgaggacatcaccggccggctgaaggaccgggtgcagcccgagatcctggaggccctgctgaagcacatctccttcgacaagttcgtgcagatctccctgaaggccctgcggcggatcgtgcccctgatggagcagggcaagcggtacgacgaggcctgcgccgagatctacggcgaccactacggcaagaagaacaccgaggagaagatctacctgccccccatccccgccgacgagatccggaaccccgtggtgctgcgggccctgtcccaggcccggaaggtgatcaacggcgtggtgcggcggtacggctcccccgcccggatccacatcgagaccgcccgggaggtgggcaagtccttcaaggaccggaaggagatcgagaagcggcaggaggagaaccggaaggaccgggagaaggccgccgccaagttccgggagtacttccccaacttcgtgggcgagcccaagtccaaggacatcctgaagctgcggctgtacgagcagcagcacggcaagtgcctgtactccggcaaggagatcaacctggtgcggctgaacgagaagggctacgtggagatcgaccacgccctgcccttctcccggacctgggacgactccttcaacaacaaggtgctggtgctgggctccgagaaccagaacaagggcaaccagaccccctacgagtacttcaacggcaaggacaactcccgggagtggcaggagttcaaggcccgggtggagacctcccggttcccccggtccaagaagcagcggatcctgctgcagaagttcgacgaggacggcttcaaggagtgcaacctgaacgacacccggtacgtgaaccgcttcctgtgccagttcgtggccgaccacatcctgctgaccggcaagggcaagcggcgggtgttcgcctccaacggccagatcaccaacctgctgcggggcttctggggcctgcggaaggtgcgggccgagaacgaccggcaccacgccctggacgccgtggtggtggcctgctccaccgtggccatgcagcagaagatcacccggttcgtgcggtacaaggagatgaacgccttcgacggcaagaccatcgacaaggagaccggcaaggtgctgcaccagaagacccacttcccccagccctgggagttcttcgcccaggaggtgatgatccgggtgttcggcaagcccgacggcaagcccgagttcgaggaggccgacacccccgagaagctgcggaccctgctggccgagaagctgtcctcccggcccgaggccgtgcacgagtacgtgacccccctgttcgtgtcccgggcccccaaccggaagatgtccggcgcccacaaggacaccctgcggtccgccaagcggttcgtgaagcacaacgagaagatctccgtgaagcgggtgtggctgaccgagatcaagctggccgacctggagaacatggtgaactacaagaacggccgggagatcgagctgtacgaggccctgaaggcccggctggaggcctacggcggcaacgccaagcaggccttcgaccccaaggacaaccccttctacaagaagggcggccagctggtgaaggccgtgcgggtggagaagacccaggagtccggcgtgctgctgaacaagaagaacgcctacaccatcgccgacaacggcgacatggtgcgggtggacgtgttctgcaaggtggacaagaagggcaagaaccagtacttcatcgtgcccatctacgcctggcaggtggccgagaacatcctgcccgacatcgactgcaagggctaccggatcgacgactcctacaccttctgcttctccctgcacaagtacgacctgatcgccttccagaaggacgagaagtccaaggtggagttcgcctactacatcaactgcgactcctccaacggccggttctacctggcctggcacgacaagggctccaaggagcagcagttccggatctccacccagaacctggtgctgatccagaagtaccaggtgaacgagctgggcaaggagatccggccctgccggctgaagaagcggccccccgtgcggtagtgactagcaccagcctcaagaacacccgaatggagtctctaagctacataataccaacttacactttacaaaatgttgtcccccaaaatgtagccattcgtatctgctcctaataaaaagaaagtttcttcacattct

SEQ ID NO: 829-899 - skipped (71 entries)

SEQ ID NO: 900 - protein, 16 aa, synthetic construct
SGSETPGTSESATPES

SEQ ID NO: 901 - protein, 12 aa, synthetic construct
SGSETPGTSESA

SEQ ID NO: 902 - protein, 21 aa, synthetic construct
SGSETPGTSESATPEGGSGGS

SEQ ID NO: 903 - protein, 7 aa, synthetic construct
PKKKRKV

SEQ ID NO: 904 - protein, 7 aa, synthetic construct
PKKKRRV

SEQ ID NO: 905 - protein, 16 aa, synthetic construct
KRPAATKKAGQAKKKK

SEQ ID NO: 906 - protein, 16 aa, synthetic construct
SGSETPGTSESATPES

SEQ ID NO: 907 - protein, 12 aa, synthetic construct
SGSETPGTSESA

SEQ ID NO: 908 - protein, 21 aa, synthetic construct
SGSETPGTSESATPEGGSGGS

SEQ ID NO: 909 - skipped

SEQ ID NO: 910 - protein, 5 aa, synthetic construct
GGGGS

SEQ ID NO: 911 - protein, 5 aa, synthetic construct
EAAAK

SEQ ID NO: 912 - protein, 5 aa, synthetic construct
SEGSA

SEQ ID NO: 913 - protein, 9 aa, synthetic construct
SEGSAGTST

SEQ ID NO: 914 - protein, 10 aa, synthetic construct
GGGGSGGGGS

SEQ ID NO: 915 - protein, 10 aa, synthetic construct
GGGGSEAAAK

SEQ ID NO: 916 - protein, 10 aa, synthetic construct
EAAAKGGGGS

SEQ ID NO: 917 - protein, 10 aa, synthetic construct
EAAAKEAAAK

SEQ ID NO: 918 - protein, 15 aa, synthetic construct
SEGSAGTSTESEGSA

SEQ ID NO: 919 - protein, 15 aa, synthetic construct
GGGGSGGGGSGGGGS

SEQ ID NO: 920 - protein, 15 aa, synthetic construct
GGGGSGGGGSEAAAK

SEQ ID NO: 921 - protein, 15 aa, synthetic construct
GGGGSEAAAKGGGGS

SEQ ID NO: 922 - protein, 15 aa, synthetic construct
EAAAKGGGGSEAAAK

SEQ ID NO: 923 - protein, 15 aa, synthetic construct
EAAAKEAAAKGGGGS

SEQ ID NO: 924 - protein, 20 aa, synthetic construct
SEGSAGTSTESEGSAGTSTE

SEQ ID NO: 925 - protein, 20 aa, synthetic construct
GGGGSGGGGSGGGGSEAAAK

SEQ ID NO: 926 - protein, 20 aa, synthetic construct
GGGGSGGGGSEAAAKGGGGS

SEQ ID NO: 927 - protein, 20 aa, synthetic construct
GGGGSEAAAKGGGGSEAAAK

SEQ ID NO: 928 - protein, 20 aa, synthetic construct
GGGGSEAAAKEAAAKGGGGS

SEQ ID NO: 929 - protein, 20 aa, synthetic construct
GGGGSEAAAKEAAAKEAAAK

SEQ ID NO: 930 - protein, 20 aa, synthetic construct
EAAAKGGGGSGGGGSGGGGS

SEQ ID NO: 931 - protein, 20 aa, synthetic construct
EAAAKGGGGSGGGGSEAAAK

SEQ ID NO: 932 - protein, 20 aa, synthetic construct
EAAAKGGGGSEAAAKGGGGS

SEQ ID NO: 933 - protein, 20 aa, synthetic construct
EAAAKGGGGSEAAAKEAAAK

SEQ ID NO: 934 - protein, 20 aa, synthetic construct
EAAAKEAAAKGGGGSGGGGS

SEQ ID NO: 935 - protein, 20 aa, synthetic construct
EAAAKEAAAKGGGGSEAAAK

SEQ ID NO: 936 - protein, 20 aa, synthetic construct
EAAAKEAAAKEAAAKGGGGS

SEQ ID NO: 937 - protein, 25 aa, synthetic construct
SEGSAGTSTESEGSAGTSTESEGSA

SEQ ID NO: 938 - protein, 25 aa, synthetic construct
GGGGSGGGGSGGGGSGGGGSGGGGS

SEQ ID NO: 939 - protein, 25 aa, synthetic construct
GGGGSGGGGSGGGGSGGGGSEAAAK

SEQ ID NO: 940 - protein, 25 aa, synthetic construct
GGGGSGGGGSGGGGSEAAAKGGGGS

SEQ ID NO: 941 - protein, 25 aa, synthetic construct
GGGGSGGGGSGGGGSEAAAKEAAAK

SEQ ID NO: 942 - protein, 25 aa, synthetic construct
GGGGSGGGGSEAAAKGGGGSGGGGS

SEQ ID NO: 943 - protein, 25 aa, synthetic construct
GGGGSGGGGSEAAAKGGGGSEAAAK

SEQ ID NO: 944 - protein, 25 aa, synthetic construct
GGGGSGGGGSEAAAKEAAAKGGGGS

SEQ ID NO: 945 - protein, 25 aa, synthetic construct
GGGGSGGGGSEAAAKEAAAKEAAAK

SEQ ID NO: 946 - protein, 25 aa, synthetic construct
GGGGSEAAAKGGGGSGGGGSGGGGS

SEQ ID NO: 947 - protein, 25 aa, synthetic construct
GGGGSEAAAKGGGGSGGGGSEAAAK

SEQ ID NO: 948 - protein, 25 aa, synthetic construct
GGGGSEAAAKGGGGSEAAAKGGGGS

SEQ ID NO: 949 - protein, 25 aa, synthetic construct
GGGGSEAAAKGGGGSEAAAKEAAAK

SEQ ID NO: 950 - protein, 25 aa, synthetic construct
GGGGSEAAAKEAAAKGGGGSGGGGS

SEQ ID NO: 951 - protein, 25 aa, synthetic construct
GGGGSEAAAKEAAAKEAAAKGGGGS

SEQ ID NO: 952 - protein, 25 aa, synthetic construct
GGGGSEAAAKEAAAKEAAAKEAAAK

SEQ ID NO: 953 - protein, 25 aa, synthetic construct
EAAAKGGGGSGGGGSGGGGSGGGGS

SEQ ID NO: 954 - protein, 25 aa, synthetic construct
EAAAKGGGGSGGGGSGGGGSEAAAK

SEQ ID NO: 955 - protein, 25 aa, synthetic construct
EAAAKGGGGSGGGGSEAAAKGGGGS

SEQ ID NO: 956 - protein, 25 aa, synthetic construct
EAAAKGGGGSGGGGSEAAAKEAAAK

SEQ ID NO: 957 - protein, 25 aa, synthetic construct
EAAAKGGGGSEAAAKGGGGSGGGGS

SEQ ID NO: 958 - protein, 25 aa, synthetic construct
EAAAKGGGGSEAAAKGGGGSEAAAK

SEQ ID NO: 959 - protein, 25 aa, synthetic construct
EAAAKGGGGSEAAAKEAAAKGGGGS

SEQ ID NO: 960 - protein, 25 aa, synthetic construct
EAAAKGGGGSEAAAKEAAAKEAAAK

SEQ ID NO: 961 - protein, 25 aa, synthetic construct
EAAAKEAAAKGGGGSEAAAKGGGGS

SEQ ID NO: 962 - protein, 25 aa, synthetic construct
EAAAKEAAAKGGGGSEAAAKEAAAK

SEQ ID NO: 963 - protein, 25 aa, synthetic construct
EAAAKEAAAKEAAAKGGGGSEAAAK

SEQ ID NO: 964 - protein, 25 aa, synthetic construct
EAAAKEAAAKEAAAKEAAAKGGGGS

SEQ ID NO: 965 - protein, 25 aa, synthetic construct
EAAAKEAAAKEAAAKEAAAKEAAAK

SEQ ID NO: 966 - protein, 16 aa, synthetic construct
GTKDSTKDIPETPSKD

SEQ ID NO: 967 - protein, 16 aa, synthetic construct
GRDVRQPEVKEEKPES

SEQ ID NO: 968 - protein, 16 aa, synthetic construct
EGKSSGSGSESKSTAG

SEQ ID NO: 969 - protein, 16 aa, synthetic construct
TPGSPAGSPTSTEEGT

SEQ ID NO: 970 - protein, 16 aa, synthetic construct
GSEPATSGSETPGTST

SEQ ID NO: 971 - skipped

SEQ ID NO: 972 - RNA, 5342 nt, synthetic construct
  source 1..5342: mol_type = other RNA
gggaagctcagaataaacgctcaactttggccggatctgccaccatggaggcctcccccgcctccggcccccggcacctgatggacccccacatcttcacctccaacttcaacaacggcatcggccggcacaagacctacctgtgctacgaggtggagcggctggacaacggcacctccgtgaagatggaccagcaccggggcttcctgcacaaccaggccaagaacctgctgtgcggcttctacggccggcacgccgagctgcggttcctggacctggtgccctccctgcagctggaccccgcccagatctaccgggtgacctggttcatctcctggtccccctgcttctcctggggctgcgccggcgaggtgcgggccttcctgcaggagaacacccacgtgcggctgcggatcttcgccgcccggatctacgactacgaccccctgtacaaggaggccctgcagatgctgcgggacgccggcgcccaggtgtccatcatgacctacgacgagttcaagcactgctgggacaccttcgtggaccaccagggctgccccttccagccctgggacggcctggacgagcactcccaggccctgtccggccggctgcgggccatcctgcagaaccagggcaactccggctccgagacccccggcacctccgagtccgccacccccgagtccgacaagaagtactccatcggcctggccatcggcaccaactccgtgggctgggccgtgatcaccgacgagtacaaggtgccctccaagaagttcaaggtgctgggcaacaccgaccggcactccatcaagaagaacctgatcggcgccctgctgttcgactccggcgagaccgccgaggccacccggctgaagcggaccgcccggcggcggtacacccggcggaagaaccggatctgctacctgcaggagatcttctccaacgagatggccaaggtggacgactccttcttccaccggctggaggagtccttcctggtggaggaggacaagaagcacgagcggcaccccatcttcggcaacatcgtggacgaggtggcctaccacgagaagtaccccaccatctaccacctgcggaagaagctggtggactccaccgacaaggccgacctgcggctgatctacctggccctggcccacatgatcaagttccggggccacttcctgatcgagggcgacctgaaccccgacaactccgacgtggacaagctgttcatccagctggtgcagacctacaaccagctgttcgaggagaaccccatcaacgcctccggcgtggacgccaaggccatcctgtccgcccggctgtccaagtcccggcggctggagaacctgatcgcccagctgcccggcgagaagaagaacggcctgttcggcaacctgatcgccctgtccctgggcctgacccccaacttcaagtccaacttcgacctggccgaggacgccaagctgcagctgtccaaggacacctacgacgacgacctggacaacctgctggcccagatcggcgaccagtacgccgacctgttcctggccgccaagaacctgtccgacgccatcctgctgtccgacatcctgcgggtgaacaccgagatcaccaaggcccccctgtccgcctccatgatcaagcggtacgacgagcaccaccaggacctgaccctgctgaaggccctggtgcggcagcagctgcccgagaagtacaaggagatcttcttcgaccagtccaagaacggctacgccggctacatcgacggcggcgcctcccaggaggagttctacaagttcatcaagcccatcctggagaagatggacggcaccgaggagctgctggtgaagctgaaccgggaggacctgctgcggaagcagcggaccttcgacaacggctccatcccccaccagatccacctgggcgagctgcacgccatcctgcggcggcaggaggacttctaccccttcctgaaggacaaccgggagaagatcgagaagatcctgaccttccggatcccctactacgtgggccccctggcccggggcaactcccggttcgcctggatgacccggaagtccgaggagaccatcaccccctggaacttcgaggaggtggtggacaagggcgcctccgcccagtccttcatcgagcggatgaccaacttcgacaagaacctgcccaacgagaaggtgctgcccaagcactccctgctgtacgagtacttcaccgtgtacaacgagctgaccaaggtgaagtacgtgaccgagggcatgcggaagcccgccttcctgtccggcgagcagaagaaggccatcgtggacctgctgttcaagaccaaccggaaggtgaccgtgaagcagctgaaggaggactacttcaagaagatcgagtgcttcgactccgtggagatctccggcgtggaggaccggttcaacgcctccctgggcacctaccacgacctgctgaagatcatcaaggacaaggacttcctggacaacgaggagaacgaggacatcctggaggacatcgtgctgaccctgaccctgttcgaggaccgggagatgatcgaggagcggctgaagacctacgcccacctgttcgacgacaaggtgatgaagcagctgaagcggcggcggtacaccggctggggccggctgtcccggaagctgatcaacggcatccgggacaagcagtccggcaagaccatcctggacttcctgaagtccgacggcttcgccaaccggaacttcatgcagctgatccacgacgactccctgaccttcaaggaggacatccagaaggcccaggtgtccggccagggcgactccctgcacgagcacatcgccaacctggccggctcccccgccatcaagaagggcatcctgcagaccgtgaaggtggtggacgagctggtgaaggtgatgggccggcacaagcccgagaacatcgtgatcgagatggcccgggagaaccagaccacccagaagggccagaagaactcccgggagcggatgaagcggatcgaggagggcatcaaggagctgggctcccagatcctgaaggagcaccccgtggagaacacccagctgcagaacgagaagctgtacctgtactacctgcagaacggccgggacatgtacgtggaccaggagctggacatcaaccggctgtccgactacgacgtggaccacatcgtgccccagtccttcctgaaggacgactccatcgacaacaaggtgctgacccggtccgacaagaaccggggcaagtccgacaacgtgccctccgaggaggtggtgaagaagatgaagaactactggcggcagctgctgaacgccaagctgatcacccagcggaagttcgacaacctgaccaaggccgagcggggcggcctgtccgagctggacaaggccggcttcatcaagcggcagctggtggagacccggcagatcaccaagcacgtggcccagatcctggactcccggatgaacaccaagtacgacgagaacgacaagctgatccgggaggtgaaggtgatcaccctgaagtccaagctggtgtccgacttccggaaggacttccagttctacaaggtgcgggagatcaacaactaccaccacgcccacgacgcctacctgaacgccgtggtgggcaccgccctgatcaagaagtaccccaagctggagtccgagttcgtgtacggcgactacaaggtgtacgacgtgcggaagatgatcgccaagtccgagcaggagatcggcaaggccaccgccaagtacttcttctactccaacatcatgaacttcttcaagaccgagatcaccctggccaacggcgagatccggaagcggcccctgatcgagaccaacggcgagaccggcgagatcgtgtgggacaagggccgggacttcgccaccgtgcggaaggtgctgtccatgccccaggtgaacatcgtgaagaagaccgaggtgcagaccggcggcttctccaaggagtccatcctgcccaagcggaactccgacaagctgatcgcccggaagaaggactgggaccccaagaagtacggcggcttcgactcccccaccgtggcctactccgtgctggtggtggccaaggtggagaagggcaagtccaagaagctgaagtccgtgaaggagctgctgggcatcaccatcatggagcggtcctccttcgagaagaaccccatcgacttcctggaggccaagggctacaaggaggtgaagaaggacctgatcatcaagctgcccaagtactccctgttcgagctggagaacggccggaagcggatgctggcctccgccggcgagctgcagaagggcaacgagctggccctgccctccaagtacgtgaacttcctgtacctggcctcccactacgagaagctgaagggctcccccgaggacaacgagcagaagcagctgttcgtggagcagcacaagcactacctggacgagatcatcgagcagatctccgagttctccaagcgggtgatcctggccgacgccaacctggacaaggtgctgtccgcctacaacaagcaccgggacaagcccatccgggagcaggccgagaacatcatccacctgttcaccctgaccaacctgggcgcccccgccgccttcaagtacttcgacaccaccatcgaccggaagcggtacacctccaccaaggaggtgctggacgccaccctgatccaccagtccatcaccggcctgtacgagacccggatcgacctgtcccagctgggcggcgacggcggcggctcccccaagaagaagcggaaggtgtgactagcaccagcctcaagaacacccgaatggagtctctaagctacataataccaacttacactttacaaaatgttgtcccccaaaatgtagccattcgtatctgctcctaataaaaagaaagtttcttcacattctctcgagaaaaaaaaaaaatggaaaaaaaaaaaacggaaaaaaaaaaaaggtaaaaaaaaaaaatataaaaaaaaaaaacataaaaaaaaaaaacgaaaaaaaaaaaacgtaaaaaaaaaaaactcaaaaaaaaaaaagataaaaaaaaaaaacctaaaaaaaaaaaatgtaaaaaaaaaaaagggaaaaaaaaaaaacgcaaaaaaaaaaaacacaaaaaaaaaaaatgcaaaaaaaaaaaatcgaaaaaaaaaaaatctaaaaaaaaaaaacgaaaaaaaaaaaacccaaaaaaaaaaaagacaaaaaaaaaaaatagaaaaaaaaaaaagttaaaaaaaaaaaactgaaaaaaaaaaaatttaaaaaaaaaaaatctag

SEQ ID NO: 973 - RNA, 5399 nt, synthetic construct
  source 1..5399: mol_type = other RNA
gggaagctcagaataaacgctcaactttggccggatctgccaccatggaggcctcccccgcctccggcccccggcacctgatggacccccacatcttcacctccaacttcaacaacggcatcggccggcacaagacctacctgtgctacgaggtggagcggctggacaacggcacctccgtgaagatggaccagcaccggggcttcctgcacaaccaggccaagaacctgctgtgcggcttctacggccggcacgccgagctgcggttcctggacctggtgccctccctgcagctggaccccgcccagatctaccgggtgacctggttcatctcctggtccccctgcttctcctggggctgcgccggcgaggtgcgggccttcctgcaggagaacacccacgtgcggctgcggatcttcgccgcccggatctacgactacgaccccctgtacaaggaggccctgcagatgctgcgggacgccggcgcccaggtgtccatcatgacctacgacgagttcaagcactgctgggacaccttcgtggaccaccagggctgccccttccagccctgggacggcctggacgagcactcccaggccctgtccggccggctgcgggccatcctgcagaaccagggcaactccggctccgagacccccggcacctccgagtccgccacccccgagtccgacaagaagtactccatcggcctggccatcggcaccaactccgtgggctgggccgtgatcaccgacgagtacaaggtgccctccaagaagttcaaggtgctgggcaacaccgaccggcactccatcaagaagaacctgatcggcgccctgctgttcgactccggcgagaccgccgaggccacccggctgaagcggaccgcccggcggcggtacacccggcggaagaaccggatctgctacctgcaggagatcttctccaacgagatggccaaggtggacgactccttcttccaccggctggaggagtccttcctggtggaggaggacaagaagcacgagcggcaccccatcttcggcaacatcgtggacgaggtggcctaccacgagaagtaccccaccatctaccacctgcggaagaagctggtggactccaccgacaaggccgacctgcggctgatctacctggccctggcccacatgatcaagttccggggccacttcctgatcgagggcgacctgaaccccgacaactccgacgtggacaagctgttcatccagctggtgcagacctacaaccagctgttcgaggagaaccccatcaacgcctccggcgtggacgccaaggccatcctgtccgcccggctgtccaagtcccggcggctggagaacctgatcgcccagctgcccggcgagaagaagaacggcctgttcggcaacctgatcgccctgtccctgggcctgacccccaacttcaagtccaacttcgacctggccgaggacgccaagctgcagctgtccaaggacacctacgacgacgacctggacaacctgctggcccagatcggcgaccagtacgccgacctgttcctggccgccaagaacctgtccgacgccatcctgctgtccgacatcctgcgggtgaacaccgagatcaccaaggcccccctgtccgcctccatgatcaagcggtacgacgagcaccaccaggacctgaccctgctgaaggccctggtgcggcagcagctgcccgagaagtacaaggagatcttcttcgaccagtccaagaacggctacgccggctacatcgacggcggcgcctcccaggaggagttctacaagttcatcaagcccatcctggagaagatggacggcaccgaggagctgctggtgaagctgaaccgggaggacctgctgcggaagcagcggaccttcgacaacggctccatcccccaccagatccacctgggcgagctgcacgccatcctgcggcggcaggaggacttctaccccttcctgaaggacaaccgggagaagatcgagaagatcctgaccttccggatcccctactacgtgggccccctggcccggggcaactcccggttcgcctggatgacccggaagtccgaggagaccatcaccccctggaacttcgaggaggtggtggacaagggcgcctccgcccagtccttcatcgagcggatgaccaacttcgacaagaacctgcccaacgagaaggtgctgcccaagcactccctgctgtacgagtacttcaccgtgtacaacgagctgaccaaggtgaagtacgtgaccgagggcatgcggaagcccgccttcctgtccggcgagcagaagaaggccatcgtggacctgctgttcaagaccaaccggaaggtgaccgtgaagcagctgaaggaggactacttcaagaagatcgagtgcttcgactccgtggagatctccggcgtggaggaccggttcaacgcctccctgggcacctaccacgacctgctgaagatcatcaaggacaaggacttcctggacaacgaggagaacgaggacatcctggaggacatcgtgctgaccctgaccctgttcgaggaccgggagatgatcgaggagcggctgaagacctacgcccacctgttcgacgacaaggtgatgaagcagctgaagcggcggcggtacaccggctggggccggctgtcccggaagctgatcaacggcatccgggacaagcagtccggcaagaccatcctggacttcctgaagtccgacggcttcgccaaccggaacttcatgcagctgatccacgacgactccctgaccttcaaggaggacatccagaaggcccaggtgtccggccagggcgactccctgcacgagcacatcgccaacctggccggctcccccgccatcaagaagggcatcctgcagaccgtgaaggtggtggacgagctggtgaaggtgatgggccggcacaagcccgagaacatcgtgatcgagatggcccgggagaaccagaccacccagaagggccagaagaactcccgggagcggatgaagcggatcgaggagggcatcaaggagctgggctcccagatcctgaaggagcaccccgtggagaacacccagctgcagaacgagaagctgtacctgtactacctgcagaacggccgggacatgtacgtggaccaggagctggacatcaaccggctgtccgactacgacgtggaccacatcgtgccccagtccttcctgaaggacgactccatcgacaacaaggtgctgacccggtccgacaagaaccggggcaagtccgacaacgtgccctccgaggaggtggtgaagaagatgaagaactactggcggcagctgctgaacgccaagctgatcacccagcggaagttcgacaacctgaccaaggccgagcggggcggcctgtccgagctggacaaggccggcttcatcaagcggcagctggtggagacccggcagatcaccaagcacgtggcccagatcctggactcccggatgaacaccaagtacgacgagaacgacaagctgatccgggaggtgaaggtgatcaccctgaagtccaagctggtgtccgacttccggaaggacttccagttctacaaggtgcgggagatcaacaactaccaccacgcccacgacgcctacctgaacgccgtggtgggcaccgccctgatcaagaagtaccccaagctggagtccgagttcgtgtacggcgactacaaggtgtacgacgtgcggaagatgatcgccaagtccgagcaggagatcggcaaggccaccgccaagtacttcttctactccaacatcatgaacttcttcaagaccgagatcaccctggccaacggcgagatccggaagcggcccctgatcgagaccaacggcgagaccggcgagatcgtgtgggacaagggccgggacttcgccaccgtgcggaaggtgctgtccatgccccaggtgaacatcgtgaagaagaccgaggtgcagaccggcggcttctccaaggagtccatcctgcccaagcggaactccgacaagctgatcgcccggaagaaggactgggaccccaagaagtacggcggcttcgactcccccaccgtggcctactccgtgctggtggtggccaaggtggagaagggcaagtccaagaagctgaagtccgtgaaggagctgctgggcatcaccatcatggagcggtcctccttcgagaagaaccccatcgacttcctggaggccaagggctacaaggaggtgaagaaggacctgatcatcaagctgcccaagtactccctgttcgagctggagaacggccggaagcggatgctggcctccgccggcgagctgcagaagggcaacgagctggccctgccctccaagtacgtgaacttcctgtacctggcctcccactacgagaagctgaagggctcccccgaggacaacgagcagaagcagctgttcgtggagcagcacaagcactacctggacgagatcatcgagcagatctccgagttctccaagcgggtgatcctggccgacgccaacctggacaaggtgctgtccgcctacaacaagcaccgggacaagcccatccgggagcaggccgagaacatcatccacctgttcaccctgaccaacctgggcgcccccgccgccttcaagtacttcgacaccaccatcgaccggaagcggtacacctccaccaaggaggtgctggacgccaccctgatccaccagtccatcaccggcctgtacgagacccggatcgacctgtcccagctgggcggcgacggcggcggctcccccaagaagaagcggaaggtgtccgagtccgccacccccgagtccgtgtccggctggcggctgttcaagaagatctcctgactagcaccagcctcaagaacacccgaatggagtctctaagctacataataccaacttacactttacaaaatgttgtcccccaaaatgtagccattcgtatctgctcctaataaaaagaaagtttcttcacattctctcgagaaaaaaaaaaaatggaaaaaaaaaaaacggaaaaaaaaaaaaggtaaaaaaaaaaaatataaaaaaaaaaaacataaaaaaaaaaaacgaaaaaaaaaaaacgtaaaaaaaaaaaactcaaaaaaaaaaaagataaaaaaaaaaaacctaaaaaaaaaaaatgtaaaaaaaaaaaagggaaaaaaaaaaaacgcaaaaaaaaaaaacacaaaaaaaaaaaatgcaaaaaaaaaaaatcgaaaaaaaaaaaatctaaaaaaaaaaaacgaaaaaaaaaaaacccaaaaaaaaaaaagacaaaaaaaaaaaatagaaaaaaaaaaaagttaaaaaaaaaaaactgaaaaaaaaaaaatttaaaaaaaaaaaatctag

SEQ ID NO: 974 - skipped

SEQ ID NO: 975 - RNA, 589 nt, synthetic construct
  source 1..589: mol_type = other RNA
gggagacccaagctggctagctcccgcagtcggcgtccagcggctctgcttgttcgtgtgtgtgtcgttgcaggccttattcggatccgccaccatgggaccgaagaagaagagaaaggtcggaggaggaagcacaaacctgtcggacatcatcgaaaaggaaacaggaaagcagctggtcatccaggaatcgatcctgatgctgccggaagaagtcgaagaagtcatcggaaacaagccggaatcggacatcctggtccacacagcatacgacgaatcgacagacgaaaacgtcatgctgctgacatcggacgcaccggaatacaagccgtgggcactggtcatccaggactcgaacggagaaaacaagatcaagatgctgtgatagtctagacatcacatttaaaagcatctcagcctaccatgagaataagagaaagaaaatgaagatcaatagcttattcatctctttttctttttcgttggtgtaaagccaacaccctgtctaaaaaacataaatttctttaatcattttgcctcttttctctgtgcttcaattaataaaaaatggaaagaacctcgagtctag

SEQ ID NO: 976 - protein, 1334 aa, synthetic construct
MDGSGGGSPKKKRKVEDKRPAATKKAGQAKKKKGGSGGGEASPASGPRHLMDPHIFTSNFNNGIGRHKTYLCYEVERLDNGTSVKMDQHRGFLHNQAKNLLCGFYGRHAELRFLDLVPSLQLDPAQIYRVTWFISWSPCFSWGCAGEVRAFLQENTHVRLRIFAARIYDYDPLYKEALQMLRDAGAQVSIMTYDEFKHCWDTFVDHQGCPFQPWDGLDEHSQALSGRLRAILQNQGNGTKDSTKDIPETPSKDAAFKPNPINYILGLAIGIASVGWAMVEIDEEENPIRLIDLGVRVFERAEVPKTGDSLAMARRLARSVRRLTRRRAHRLLRARRLLKREGVLQAADFDENGLIKSLPNTPWQLRAAALDRKLTPLEWSAVLLHLIKHRGYLSQRKNEGETADKELGALLKGVANNAHALQTGDFRTPAELALNKFEKESGHIRNQRGDYSHTFSRKDLQAELILLFEKQKEFGNPHVSGGLKEGIETLLMTQRPALSGDAVQKMLGHCTFEPAEPKAAKNTYTAERFIWLTKLNNLRILEQGSERPLTDTERATLMDEPYRKSKLTYAQARKLLGLEDTAFFKGLRYGKDNAEASTLMEMKAYHAISRALEKEGLKDKKSPLNLSSELQDEIGTAFSLFKTDEDITGRLKDRVQPEILEALLKHISFDKFVQISLKALRRIVPLMEQGKRYDEACAEIYGDHYGKKNTEEKIYLPPIPADEIRNPVVLRALSQARKVINGVVRRYGSPARIHIETAREVGKSFKDRKEIEKRQEENRKDREKAAAKFREYFPNFVGEPKSKDILKLRLYEQQHGKCLYSGKEINLVRLNEKGYVEIDHALPFSRTWDDSFNNKVLVLGSENQNKGNQTPYEYFNGKDNSREWQEFKARVETSRFPRSKKQRILLQKFDEDGFKECNLNDTRYVNRFLCQFVADHILLTGKGKRRVFASNGQITNLLRGFWGLRKVRAENDRHHALDAVVVACSTVAMQQKITRFVRYKEMNAFDGKTIDKETGKVLHQKTHFPQPWEFFAQEVMIRVFGKPDGKPEFEEADTPEKLRTLLAEKLSSRPEAVHEYVTPLFVSRAPNRKMSGAHKDTLRSAKRFVKHNEKISVKRVWLTEIKLADLENMVNYKNGREIELYEALKARLEAYGGNAKQAFDPKDNPFYKKGGQLVKAVRVEKTQESGVLLNKKNAYTIADNGDMVRVDVFCKVDKKGKNQYFIVPIYAWQVAENILPDIDCKGYRIDDSYTFCFSLHKYDLIAFQKDEKSKVEFAYYINCDSSNGRFYLAWHDKGSKEQQFRISTQNLVLIQKYQVNELGKEIRPCRLKKRPPVR

SEQ ID NO: 977 - protein, 1710 aa, synthetic construct
MSSETGPVAVDPTLRRRIEPHEFEVFFDPRELRKETCLLYEINWGGRHSIWRHTSQNTNKHVEVNFIEKFTTERYFCPNTRCSITWFLSWSPCGECSRAITEFLSRYPHVTLFIYIARLYHHADPRNRQGLRDLISSGVTIQIMTEQESGYCWRNFVNYSPSNEAHWPRYPHLWVRLYVLELYCIILGLPPCLNILRRKQPQLTFFTIALQSCHYQRLPPHILWATGLKSGSETPGTSESATPESDKKYSIGLAIGTNSVGWAVITDEYKVPSKKFKVLGNTDRHSIKKNLIGALLFDSGETAEATRLKRTARRRYTRRKNRICYLQEIFSNEMAKVDDSFFHRLEESFLVEEDKKHERHPIFGNIVDEVAYHEKYPTIYHLRKKLVDSTDKADLRLIYLALAHMIKFRGHFLIEGDLNPDNSDVDKLFIQLVQTYNQLFEENPINASGVDAKAILSARLSKSRRLENLIAQLPGEKKNGLFGNLIALSLGLTPNFKSNFDLAEDAKLQLSKDTYDDDLDNLLAQIGDQYADLFLAAKNLSDAILLSDILRVNTEITKAPLSASMIKRYDEHHQDLTLLKALVRQQLPEKYKEIFFDQSKNGYAGYIDGGASQEEFYKFIKPILEKMDGTEELLVKLNREDLLRKQRTFDNGSIPHQIHLGELHAILRRQEDFYPFLKDNREKIEKILTFRIPYYVGPLARGNSRFAWMTRKSEETITPWNFEEVVDKGASAQSFIERMTNFDKNLPNEKVLPKHSLLYEYFTVYNELTKVKYVTEGMRKPAFLSGEQKKAIVDLLFKTNRKVTVKQLKEDYFKKIECFDSVEISGVEDRFNASLGTYHDLLKIIKDKDFLDNEENEDILEDIVLTLTLFEDREMIEERLKTYAHLFDDKVMKQLKRRRYTGWGRLSRKLINGIRDKQSGKTILDFLKSDGFANRNFMQLIHDDSLTFKEDIQKAQVSGQGDSLHEHIANLAGSPAIKKGILQTVKVVDELVKVMGRHKPENIVIEMARENQTTQKGQKNSRERMKRIEEGIKELGSQILKEHPVENTQLQNEKLYLYYLQNGRDMYVDQELDINRLSDYDVDHIVPQSFLKDDSIDNKVLTRSDKNRGKSDNVPSEEVVKKMKNYWRQLLNAKLITQRKFDNLTKAERGGLSELDKAGFIKRQLVETRQITKHVAQILDSRMNTKYDENDKLIREVKVITLKSKLVSDFRKDFQFYKVREINNYHHAHDAYLNAVVGTALIKKYPKLESEFVYGDYKVYDVRKMIAKSEQEIGKATAKYFFYSNIMNFFKTEITLANGEIRKRPLIETNGETGEIVWDKGRDFATVRKVLSMPQVNIVKKTEVQTGGFSKESILPKRNSDKLIARKKDWDPKKYGGFDSPTVAYSVLVVAKVEKGKSKKLKSVKELLGITIMERSSFEKNPIDFLEAKGYKEVKKDLIIKLPKYSLFELENGRKRMLASAGELQKGNELALPSKYVNFLYLASHYEKLKGSPEDNEQKQLFVEQHKHYLDEIIEQISEFSKRVILADANLDKVLSAYNKHRDKPIREQAENIIHLFTLTNLGAPAAFKYFDTTIDRKRYTSTKEVLDATLIHQSITGLYETRIDLSQLGGDSGGSTNLSDIIEKETGKQLVIQESILMLPEEVEEVIGNKPESDILVHTAYDESTDENVMLLTSDAPEYKPWALVIQDSNGENKIKMLSGGSPKKKRKV

SEQ ID NO: 978 - protein, 1710 aa, synthetic construct; identical to SEQ ID NO: 977

SEQ ID NO: 979 - protein, 1789 aa, synthetic construct
MEASPASGPRHLMDPHIFTSNFNNGIGRHKTYLCYEVERLDNGTSVKMDQHRGFLHNQAKNLLCGFYGRHAELRFLDLVPSLQLDPAQIYRVTWFISWSPCFSWGCAGEVRAFLQENTHVRLRIFAARIYDYDPLYKEALQMLRDAGAQVSIMTYDEFKHCWDTFVDHQGCPFQPWDGLDEHSQALSGRLRAILQNQGNSGSETPGTSESATPESDKKYSIGLAIGTNSVGWAVITDEYKVPSKKFKVLGNTDRHSIKKNLIGALLFDSGETAEATRLKRTARRRYTRRKNRICYLQEIFSNEMAKVDDSFFHRLEESFLVEEDKKHERHPIFGNIVDEVAYHEKYPTIYHLRKKLVDSTDKADLRLIYLALAHMIKFRGHFLIEGDLNPDNSDVDKLFIQLVQTYNQLFEENPINASGVDAKAILSARLSKSRRLENLIAQLPGEKKNGLFGNLIALSLGLTPNFKSNFDLAEDAKLQLSKDTYDDDLDNLLAQIGDQYADLFLAAKNLSDAILLSDILRVNTEITKAPLSASMIKRYDEHHQDLTLLKALVRQQLPEKYKEIFFDQSKNGYAGYIDGGASQEEFYKFIKPILEKMDGTEELLVKLNREDLLRKQRTFDNGSIPHQIHLGELHAILRRQEDFYPFLKDNREKIEKILTFRIPYYVGPLARGNSRFAWMTRKSEETITPWNFEEVVDKGASAQSFIERMTNFDKNLPNEKVLPKHSLLYEYFTVYNELTKVKYVTEGMRKPAFLSGEQKKAIVDLLFKTNRKVTVKQLKEDYFKKIECFDSVEISGVEDRFNASLGTYHDLLKIIKDKDFLDNEENEDILEDIVLTLTLFEDREMIEERLKTYAHLFDDKVMKQLKRRRYTGWGRLSRKLINGIRDKQSGKTILDFLKSDGFANRNFMQLIHDDSLTFKEDIQKAQVSGQGDSLHEHIANLAGSPAIKKGILQTVKVVDELVKVMGRHKPENIVIEMARENQTTQKGQKNSRERMKRIEEGIKELGSQILKEHPVENTQLQNEKLYLYYLQNGRDMYVDQELDINRLSDYDVDHIVPQSFLKDDSIDNKVLTRSDKNRGKSDNVPSEEVVKKMKNYWRQLLNAKLITQRKFDNLTKAERGGLSELDKAGFIKRQLVETRQITKHVAQILDSRMNTKYDENDKLIREVKVITLKSKLVSDFRKDFQFYKVREINNYHHAHDAYLNAVVGTALIKKYPKLESEFVYGDYKVYDVRKMIAKSEQEIGKATAKYFFYSNIMNFFKTEITLANGEIRKRPLIETNGETGEIVWDKGRDFATVRKVLSMPQVNIVKKTEVQTGGFSKESILPKRNSDKLIARKKDWDPKKYGGFDSPTVAYSVLVVAKVEKGKSKKLKSVKELLGITIMERSSFEKNPIDFLEAKGYKEVKKDLIIKLPKYSLFELENGRKRMLASAGELQKGNELALPSKYVNFLYLASHYEKLKGSPEDNEQKQLFVEQHKHYLDEIIEQISEFSKRVILADANLDKVLSAYNKHRDKPIREQAENIIHLFTLTNLGAPAAFKYFDTTIDRKRYTSTKEVLDATLIHQSITGLYETRIDLSQLGGDSGGSGGSGGSTNLSDIIEKETGKQLVIQESILMLPEEVEEVIGNKPESDILVHTAYDESTDENVMLLTSDAPEYKPWALVIQDSNGENKIKMLSGGSGGSGGSTNLSDIIEKETGKQLVIQESILMLPEEVEEVIGNKPESDILVHTAYDESTDENVMLLTSDAPEYKPWALVIQDSNGENKIKMLSGGSKRTADGSEFEPKKKRKV

SEQ ID NO: 980 - protein, 1853 aa, synthetic construct
MKRTADGSEFESPKKKRKVSSETGPVAVDPTLRRRIEPHEFEVFFDPRELRKETCLLYEINWGGRHSIWRHTSQNTNKHVEVNFIEKFTTERYFCPNTRCSITWFLSWSPCGECSRAITEFLSRYPHVTLFIYIARLYHHADPRNRQGLRDLISSGVTIQIMTEQESGYCWRNFVNYSPSNEAHWPRYPHLWVRLYVLELYCIILGLPPCLNILRRKQPQLTFFTIALQSCHYQRLPPHILWATGLKSGGSSGGSSGSETPGTSESATPESSGGSSGGSDKKYSIGLAIGTNSVGWAVITDEYKVPSKKFKVLGNTDRHSIKKNLIGALLFDSGETAEATRLKRTARRRYTRRKNRICYLQEIFSNEMAKVDDSFFHRLEESFLVEEDKKHERHPIFGNIVDEVAYHEKYPTIYHLRKKLVDSTDKADLRLIYLALAHMIKFRGHFLIEGDLNPDNSDVDKLFIQLVQTYNQLFEENPINASGVDAKAILSARLSKSRRLENLIAQLPGEKKNGLFGNLIALSLGLTPNFKSNFDLAEDAKLQLSKDTYDDDLDNLLAQIGDQYADLFLAAKNLSDAILLSDILRVNTEITKAPLSASMIKRYDEHHQDLTLLKALVRQQLPEKYKEIFFDQSKNGYAGYIDGGASQEEFYKFIKPILEKMDGTEELLVKLNREDLLRKQRTFDNGSIPHQIHLGELHAILRRQEDFYPFLKDNREKIEKILTFRIPYYVGPLARGNSRFAWMTRKSEETITPWNFEEVVDKGASAQSFIERMTNFDKNLPNEKVLPKHSLLYEYFTVYNELTKVKYVTEGMRKPAFLSGEQKKAIVDLLFKTNRKVTVKQLKEDYFKKIECFDSVEISGVEDRFNASLGTYHDLLKIIKDKDFLDNEENEDILEDIVLTLTLFEDREMIEERLKTYAHLFDDKVMKQLKRRRYTGWGRLSRKLINGIRDKQSGKTILDFLKSDGFANRNFMQLIHDDSLTFKEDIQKAQVSGQGDSLHEHIANLAGSPAIKKGILQTVKVVDELVKVMGRHKPENIVIEMARENQTTQKGQKNSRERMKRIEEGIKELGSQILKEHPVENTQLQNEKLYLYYLQNGRDMYVDQELDINRLSDYDVDHIVPQSFLKDDSIDNKVLTRSDKNRGKSDNVPSEEVVKKMKNYWRQLLNAKLITQRKFDNLTKAERGGLSELDKAGFIKRQLVETRQITKHVAQILDSRMNTKYDENDKLIREVKVITLKSKLVSDFRKDFQFYKVREINNYHHAHDAYLNAVVGTALIKKYPKLESEFVYGDYKVYDVRKMIAKSEQEIGKATAKYFFYSNIMNFFKTEITLANGEIRKRPLIETNGETGEIVWDKGRDFATVRKVLSMPQVNIVKKTEVQTGGFSKESILPKRNSDKLIARKKDWDPKKYGGFDSPTVAYSVLVVAKVEKGKSKKLKSVKELLGITIMERSSFEKNPIDFLEAKGYKEVKKDLIIKLPKYSLFELENGRKRMLASAGELQKGNELALPSKYVNFLYLASHYEKLKGSPEDNEQKQLFVEQHKHYLDEIIEQISEFSKRVILADANLDKVLSAYNKHRDKPIREQAENIIHLFTLTNLGAPAAFKYFDTTIDRKRYTSTKEVLDATLIHQSITGLYETRIDLSQLGGDSGGSGGSGGSTNLSDIIEKETGKQLVIQESILMLPEEVEEVIGNKPESDILVHTAYDESTDENVMLLTSDAPEYKPWALVIQDSNGENKIKMLSGGSGGSGGSTNLSDIIEKETGKQLVIQESILMLPEEVEEVIGNKPESDILVHTAYDESTDENVMLLTSDAPEYKPWALVIQDSNGENKIKMLSGGSKRTADGSEFEPKKKRKV

SEQ ID NO: 981 - DNA, 1512 bp, synthetic construct
  source 1..1512: mol_type = other DNA
atggacttccaggtgcagatcttcagcttcctgctgatcagcgccagcgtgatcatgagccggatggcccaggtgcagctgcagcagagcggcgccgagctggcccggcccggcgccagcgtgaagatgagctgcaaggccagcggctacaccttcaccacctacaccatccactgggtgcggcggcggcccggccacgacctggagtggatcggctacatcaaccccagcagcggctgcagcgactacaaccagaacttcaagggcaagaccaccctgaccgccgacaagagcagcaacaccgcctacatgcagctgaacagcctgaccagcgaggacagcgccgtgtactactgcgcccggcgggccgactacggcaactacgagtacacctggttcgcctactggggccagggcaccaccgtgaccgtgagcagcagcggcggcggcagcggcggcggcggcagcggcggcggcggcagcgtgatcgagctgacccagagccccaagttcatgagcaccagcgtgggcgaccgggtgaacgtgacctacaaggccagccagaacgtgggcaccaacgtggcctggttccagcagaagcccggccagagccccaaggtgctgatctacagcgccagctaccggtacagcggcgtgcccgaccggttcaccggcagcggcagcggcaccgacttcaccctgaccatcagcaacgtgcagagcgaggacctggccgagtacttctgccagcagtaccacacctaccccctgaccttcggcggcggcaccaagctggagatcaagcggagcgaccccgccaccaccacccccgccccccggccccccacccccgcccccaccatcgccagccagcccctgagcctgcggcccgaggcctgccggcccgccgccggcggcgccgtgcacacccggggcctggacttcgcctgcgacaaggaccccaagttctgggtgctggtggtggtgggcggcgtgctggcctgctacagcctgctggtgaccgtggccttcatcatcttctgggtgcggagcaagcggagccggctgctgcacagcgactacatgaacatgaccccccggcggcccggccccacccggaagcactaccagccctacgcccccccccgggacttcgccgcctaccggagcctgcgggtgaagttcagccggagcgccgacgcccccgcctaccagcagggccagaaccagctgtacaacgagctgaacctgggccggcgggaggagtacgacgtgctggacaagcggcggggccgggaccccgagatgggcggcaagccccggcggaagaacccccaggagggcctgtacaacgagctgcagaaggacaagatggccgaggcctacagcgagatcggcatgaagggcgagcggcggcggggcaagggccacgacggcctgtaccagggcctgagcaccgccaccaaggacacctacgacgccctgcacatgcaggccctgcccccccggtaa

SEQ ID NO: 982 - protein, 503 aa, synthetic construct
MDFQVQIFSFLLISASVIMSRMAQVQLQQSGAELARPGASVKMSCKASGYTFTTYTIHWVRRRPGHDLEWIGYINPSSGCSDYNQNFKGKTTLTADKSSNTAYMQLNSLTSEDSAVYYCARRADYGNYEYTWFAYWGQGTTVTVSSSGGGSGGGGSGGGGSVIELTQSPKFMSTSVGDRVNVTYKASQNVGTNVAWFQQKPGQSPKVLIYSASYRYSGVPDRFTGSGSGTDFTLTISNVQSEDLAEYFCQQYHTYPLTFGGGTKLEIKRSDPATTTPAPRPPTPAPTIASQPLSLRPEACRPAAGGAVHTRGLDFACDKDPKFWVLVVVGGVLACYSLLVTVAFIIFWVRSKRSRLLHSDYMNMTPRRPGPTRKHYQPYAPPRDFAAYRSLRVKFSRSADAPAYQQGQNQLYNELNLGRREEYDVLDKRRGRDPEMGGKPRRKNPQEGLYNELQKDKMAEAYSEIGMKGERRRGKGHDGLYQGLSTATKDTYDALHMQALPPR

SEQ ID NO: 983 - DNA, 69 bp, synthetic construct
  source 1..69: mol_type = other DNA
atggacttccaggtgcagatcttcagcttcctgctgatcagcgccagcgtgatcatgagccggatggcc

SEQ ID NO: 984 - protein, 23 aa, synthetic construct
MDFQVQIFSFLLISASVIMSRMA

SEQ ID NO: 985 - DNA, 738 bp, synthetic construct
  source 1..738: mol_type = other DNA
caggtgcagctgcagcagagcggcgccgagctggcccggcccggcgccagcgtgaagatgagctgcaaggccagcggctacaccttcaccacctacaccatccactgggtgcggcggcggcccggccacgacctggagtggatcggctacatcaaccccagcagcggctgcagcgactacaaccagaacttcaagggcaagaccaccctgaccgccgacaagagcagcaacaccgcctacatgcagctgaacagcctgaccagcgaggacagcgccgtgtactactgcgcccggcgggccgactacggcaactacgagtacacctggttcgcctactggggccagggcaccaccgtgaccgtgagcagcagcggcggcggcagcggcggcggcggcagcggcggcggcggcagcgtgatcgagctgacccagagccccaagttcatgagcaccagcgtgggcgaccgggtgaacgtgacctacaaggccagccagaacgtgggcaccaacgtggcctggttccagcagaagcccggccagagccccaaggtgctgatctacagcgccagctaccggtacagcggcgtgcccgaccggttcaccggcagcggcagcggcaccgacttcaccctgaccatcagcaacgtgcagagcgaggacctggccgagtacttctgccagcagtaccacacctaccccctgaccttcggcggcggcaccaagctggagatcaagcgg

SEQ ID NO: 986 - protein, 246 aa, synthetic construct
QVQLQQSGAELARPGASVKMSCKASGYTFTTYTIHWVRRRPGHDLEWIGYINPSSGCSDYNQNFKGKTTLTADKSSNTAYMQLNSLTSEDSAVYYCARRADYGNYEYTWFAYWGQGTTVTVSSSGGGSGGGGSGGGGSVIELTQSPKFMSTSVGDRVNVTYKASQNVGTNVAWFQQKPGQSPKVLIYSASYRYSGVPDRFTGSGSGTDFTLTISNVQSEDLAEYFCQQYHTYPLTFGGGTKLEIKR

SEQ ID NO: 987 - DNA, 135 bp, synthetic construct
  source 1..135: mol_type = other DNA
accaccacccccgccccccggccccccacccccgcccccaccatcgccagccagcccctgagcctgcggcccgaggcctgccggcccgccgccggcggcgccgtgcacacccggggcctggacttcgcctgcgac

SEQ ID NO: 988 - protein, 45 aa, synthetic construct
TTTPAPRPPTPAPTIASQPLSLRPEACRPAAGGAVHTRGLDFACD

SEQ ID NO: 989 - DNA, 204 bp, synthetic construct
  source 1..204: mol_type = other DNA
ttctgggtgctggtggtggtgggcggcgtgctggcctgctacagcctgctggtgaccgtggccttcatcatcttctgggtgcggagcaagcggagccggctgctgcacagcgactacatgaacatgaccccccggcggcccggccccacccggaagcactaccagccctacgcccccccccgggacttcgccgcctaccggagc

SEQ ID NO: 990 - protein, 68 aa, synthetic construct
FWVLVVVGGVLACYSLLVTVAFIIFWVRSKRSRLLHSDYMNMTPRRPGPTRKHYQPYAPPRDFAAYRS

SEQ ID NO: 991 - DNA, 339 bp, synthetic construct
  source 1..339: mol_type = other DNA
ctgcgggtgaagttcagccggagcgccgacgcccccgcctaccagcagggccagaaccagctgtacaacgagctgaacctgggccggcgggaggagtacgacgtgctggacaagcggcggggccgggaccccgagatgggcggcaagccccggcggaagaacccccaggagggcctgtacaacgagctgcagaaggacaagatggccgaggcctacagcgagatcggcatgaagggcgagcggcggcggggcaagggccacgacggcctgtaccagggcctgagcaccgccaccaaggacacctacgacgccctgcacatgcaggccctgcccccccgg

SEQ ID NO: 992 - protein, 113 aa, synthetic construct
LRVKFSRSADAPAYQQGQNQLYNELNLGRREEYDVLDKRRGRDPEMGGKPRRKNPQEGLYNELQKDKMAEAYSEIGMKGERRRGKGHDGLYQGLSTATKDTYDALHMQALPPR

SEQ ID NO: 993 - RNA, 100 nt, synthetic construct
  source 1..100: mol_type = other RNA
  modified_base 1: mod_base = OTHER; note = 2'-O-methyl modified nucleotide with phosphorothioate linkage
  modified_base 2: mod_base = OTHER; note = 2'-O-methyl modified nucleotide with phosphorothioate linkage
  modified_base 3: mod_base = OTHER; note = 2'-O-methyl modified nucleotide with phosphorothioate linkage
  modified_base 29: mod_base = OTHER; note = 2'-O-methyl modified nucleotide
  modified_base 30: mod_base = OTHER; note = 2'-O-methyl modified nucleotide
  modified_base 31: mod_base = OTHER; note = 2'-O-methyl modified nucleotide
  modified_base 32: mod_base = OTHER; note = 2'-O-methyl modified nucleotide
  modified_base 33: mod_base = OTHER; note = 2'-O-methyl modified nucleotide
  modified_base 34: mod_base = OTHER; note = 2'-O-methyl modified nucleotide
  modified_base 35: mod_base = OTHER; note = 2'-O-methyl modified nucleotide
  modified_base 36: mod_base = OTHER; note = 2'-O-methyl modified nucleotide
  modified_base 37: mod_base = OTHER; note = 2'-O-methyl modified nucleotide
  modified_base 38: mod_base = OTHER; note = 2'-O-methyl modified nucleotide
  modified_base 39: mod_base = OTHER; note = 2'-O-methyl modified nucleotide
  modified_base 40: mod_base = OTHER; note = 2'-O-methyl modified nucleotide
  modified_base 69: mod_base = OTHER; note = 2'-O-methyl modified nucleotide
  modified_base 70: mod_base = OTHER; note = 2'-O-methyl modified nucleotide
  modified_base 71: mod_base = OTHER; note = 2'-O-methyl modified nucleotide
  modified_base 72: mod_base = OTHER; note = 2'-O-methyl modified nucleotide
  modified_base 73: mod_base = OTHER; note = 2'-O-methyl modified nucleotide
  modified_base 74: mod_base = OTHER; note = 2'-O-methyl modified nucleotide
  modified_base 75: mod_base = OTHER; note = 2'-O-methyl modified nucleotide
  modified_base 76: mod_base = OTHER; note = 2'-O-methyl modified nucleotide
  modified_base 77: mod_base = OTHER; note = 2'-O-methyl modified nucleotide
  modified_base 78: mod_base = OTHER; note = 2'-O-methyl modified nucleotide
  modified_base 79: mod_base = OTHER; note = 2'-O-methyl modified nucleotide
  modified_base 80: mod_base = OTHER; note = 2'-O-methyl modified nucleotide
  modified_base 81: mod_base = OTHER; note = 2'-O-methyl modified nucleotide
  modified_base 82: mod_base = OTHER; note = 2'-O-methyl modified nucleotide
  modified_base 83: mod_base = OTHER; note = 2'-O-methyl modified nucleotide
  modified_base 84: mod_base = OTHER; note = 2'-O-methyl modified nucleotide
  modified_base 85: mod_base = OTHER; note = 2'-O-methyl modified nucleotide
  modified_base 86: mod_base = OTHER; note = 2'-O-methyl modified nucleotide
  modified_base 87: mod_base = OTHER; note = 2'-O-methyl modified nucleotide
  modified_base 88: mod_base = OTHER; note = 2'-O-methyl modified nucleotide
  modified_base 89: mod_base = OTHER; note = 2'-O-methyl modified nucleotide
  modified_base 90: mod_base = OTHER; note = 2'-O-methyl modified nucleotide
  modified_base 91: mod_base = OTHER; note = 2'-O-methyl modified nucleotide
  modified_base 92: mod_base = OTHER; note = 2'-O-methyl modified nucleotide
  modified_base 93: mod_base = OTHER; note = 2'-O-methyl modified nucleotide
  modified_base 94: mod_base = OTHER; note = 2'-O-methyl modified nucleotide
  modified_base 95: mod_base = OTHER; note = 2'-O-methyl modified nucleotide
  modified_base 96: mod_base = OTHER; note = 2'-O-methyl modified nucleotide
  modified_base 97: mod_base = OTHER; note = 2'-O-methyl modified nucleotide with phosphorothioate linkage
  modified_base 98: mod_base = OTHER; note = 2'-O-methyl modified nucleotide with phosphorothioate linkage
  modified_base 99: mod_base = OTHER; note = 2'-O-methyl modified nucleotide with phosphorothioate linkage
  modified_base 100: mod_base = OTHER; note = 2'-O-methyl modified nucleotide
ggccacggagcgagacatctgttttagagctagaaatagcaagttaaaataaggctagtccgttatcaacttgaaaaagtggcaccgagtcggtgctttt

SEQ ID NO: 994 - RNA, 101 nt, synthetic construct
  source 1..101: mol_type = other RNA
  modified_base 1: mod_base = OTHER; note = 2'-O-methyl modified nucleotide with phosphorothioate linkage
  modified_base 2: mod_base = OTHER; note = 2'-O-methyl modified nucleotide with phosphorothioate linkage
  modified_base 3: mod_base = OTHER; note = 2'-O-methyl modified nucleotide with phosphorothioate linkage
  modified_base 4: mod_base = OTHER; note = 2'-O-methyl modified nucleotide
  modified_base 5: mod_base = OTHER; note = 2'-O-methyl modified nucleotide
  modified_base 8: mod_base = OTHER; note = 2'-O-methyl modified nucleotide
  modified_base 9: mod_base = OTHER; note = 2'-O-methyl modified nucleotide
  modified_base 11: mod_base = OTHER; note = 2'-O-methyl modified nucleotide
  modified_base 13: mod_base = OTHER; note = 2'-O-methyl modified nucleotide
  modified_base 18: mod_base = OTHER; note = 2'-O-methyl modified nucleotide
  modified_base 22: mod_base = OTHER; note = 2'-O-methyl modified nucleotide
  modified_base 25: mod_base = OTHER; note = 2'-O-methyl modified nucleotide
  modified_base 29: mod_base = OTHER; note = 2'-O-methyl modified nucleotide
  modified_base 30: mod_base = OTHER; note = 2'-O-methyl modified nucleotide
  modified_base 31: mod_base = OTHER; note = 2'-O-methyl modified nucleotide
  modified_base 32: mod_base = OTHER; note = 2'-O-methyl modified nucleotide
  modified_base 37: mod_base = OTHER; note = 2'-O-methyl modified nucleotide
  modified_base 38: mod_base = OTHER; note = 2'-O-methyl modified nucleotide
  modified_base 39: mod_base = OTHER; note = 2'-O-methyl modified nucleotide
  modified_base 40: mod_base = OTHER; note = 2'-O-methyl modified nucleotide
  modified_base 41: mod_base = OTHER; note = 2'-O-methyl modified nucleotide
  modified_base 42: mod_base = OTHER; note = 2'-O-methyl modified nucleotide
  modified_base 43: mod_base = OTHER; note = 2'-O-methyl modified nucleotide
  modified_base 47: mod_base = OTHER; note = 2'-O-methyl modified nucleotide
  modified_base 48: mod_base = OTHER; note = 2'-O-methyl modified nucleotide
  modified_base 51: mod_base = OTHER; note = 2'-O-methyl modified nucleotide
  modified_base 54: mod_base = OTHER; note = nucleotide with phosphorothioate linkage
  modified_base 58: mod_base = OTHER; note = 2'-O-methyl modified nucleotide
  modified_base 59: mod_base = OTHER; note = 2'-O-methyl modified nucleotide
  modified_base 61: mod_base = OTHER; note = 2'-O-methyl modified nucleotide
  modified_base 62: mod_base = OTHER; note = 2'-O-methyl modified nucleotide
  modified_base 63: mod_base = OTHER; note = 2'-O-methyl modified nucleotide
  modified_base 64: mod_base = OTHER; note = 2'-O-methyl modified nucleotide
  modified_base 65: mod_base = OTHER; note = 2'-O-methyl modified nucleotide
  modified_base 66: mod_base = OTHER; note = 2'-O-methyl modified nucleotide
  modified_base 67: mod_base = OTHER; note = 2'-O-methyl modified nucleotide
  modified_base 68: mod_base = OTHER; note = 2'-O-methyl modified nucleotide
  modified_base 69: mod_base = OTHER; note = 2'-O-methyl modified nucleotide
  modified_base 70: mod_base = OTHER; note = 2'-O-methyl modified nucleotide
  modified_base 75: mod_base = OTHER; note = 2'-O-methyl modified nucleotide
  modified_base 77: mod_base = OTHER; note = 2'-O-methyl modified nucleotide
  modified_base 80: mod_base = OTHER; note = 2'-O-methyl modified nucleotide
  modified_base 86: mod_base = OTHER; note = 2'-O-methyl modified nucleotide
  modified_base 87: mod_base = OTHER; note = 2'-O-methyl modified nucleotide
  modified_base 89: mod_base = OTHER; note = 2'-O-methyl modified nucleotide
  modified_base 90: mod_base = OTHER; note = 2'-O-methyl modified nucleotide
  modified_base 91: mod_base = OTHER; note = 2'-O-methyl modified nucleotide
  modified_base 92: mod_base = OTHER; note = 2'-O-methyl modified nucleotide
  modified_base 99: mod_base = OTHER; note = nucleotide with phosphorothioate linkage
  modified_base 100: mod_base = OTHER; note = 2'-O-methyl modified nucleotide with phosphorothioate linkage
  modified_base 101: mod_base = OTHER; note = 2'-O-methyl modified nucleotide
atatccagaaccctgaccctgccggttgtagctccctgaaaccgttgctacaataaggccgtcgaaagatgtgccgcaacgctctgccttctggcatcgtt

SEQ ID NO: 995 - RNA, 101 nt, synthetic construct
  source 1..101: mol_type = other RNA
  modified_base 1: mod_base = OTHER; note = 2'-O-methyl modified nucleotide with phosphorothioate linkage
  modified_base 2: mod_base = OTHER; note = 2'-O-methyl modified nucleotide with phosphorothioate linkage
  modified_base 3: mod_base = OTHER; note = 2'-O-methyl modified nucleotide with phosphorothioate linkage
  modified_base 4: mod_base = OTHER; note = 2'-O-methyl modified nucleotide
  modified_base 5: mod_base = OTHER; note = 2'-O-methyl modified nucleotide
  modified_base 8: mod_base = OTHER; note = 2'-O-methyl modified nucleotide
  modified_base 9: mod_base = OTHER; note = 2'-O-methyl modified nucleotide
  modified_base 11: mod_base = OTHER; note = 2'-O-methyl modified nucleotide
  modified_base 13: mod_base = OTHER; note = 2'-O-methyl modified nucleotide
  modified_base 18: mod_base = OTHER; note = 2'-O-methyl modified nucleotide
  modified_base 22: mod_base = OTHER; note = 2'-O-methyl modified nucleotide
  modified_base 25: mod_base = OTHER; note = 2'-O-methyl modified nucleotide
  modified_base 29: mod_base = OTHER; note = 2'-O-methyl modified nucleotide
  modified_base 30: mod_base = OTHER; note = 2'-O-methyl modified nucleotide
  modified_base 31: mod_base = OTHER; note = 2'-O-methyl modified nucleotide
  modified_base 32: mod_base = OTHER; note = 2'-O-methyl modified nucleotide
  modified_base 37: mod_base = OTHER; note = 2'-O-methyl modified nucleotide
  modified_base 38: mod_base = OTHER; note = 2'-O-methyl modified nucleotide
  modified_base 39: mod_base = OTHER; note = 2'-O-methyl modified nucleotide
  modified_base 40: mod_base = OTHER; note = 2'-O-methyl modified nucleotide
  modified_base 41: mod_base = OTHER; note = 2'-O-methyl modified nucleotide
  modified_base 42: mod_base = OTHER; note = 2'-O-methyl modified nucleotide
  modified_base 43: mod_base = OTHER; note = 2'-O-methyl modified nucleotide
  modified_base 47: mod_base = OTHER; note = 2'-O-methyl modified nucleotide
  modified_base 48: mod_base = OTHER; note = 2'-O-methyl modified nucleotide
  modified_base 51: mod_base = OTHER; note = 2'-O-methyl modified nucleotide
  modified_base 54: mod_base = OTHER; note = nucleotide with phosphorothioate linkage
  modified_base 58: mod_base = OTHER; note = 2'-O-methyl modified nucleotide
  modified_base 59: mod_base = OTHER; note = 2'-O-methyl modified nucleotide
  modified_base 61: mod_base = OTHER; note = 2'-O-methyl modified nucleotide
  modified_base 62: mod_base = OTHER; note = 2'-O-methyl modified nucleotide
  modified_base 63: mod_base = OTHER; note = 2'-O-methyl modified nucleotide
  modified_base 64: mod_base = OTHER; note = 2'-O-methyl modified nucleotide
  modified_base 65: mod_base = OTHER; note = 2'-O-methyl modified nucleotide
  modified_base 66: mod_base = OTHER; note = 2'-O-methyl modified nucleotide
  modified_base 67: mod_base = OTHER; note = 2'-O-methyl modified nucleotide
  modified_base 68: mod_base = OTHER; note = 2'-O-methyl modified nucleotide
  modified_base 69: mod_base = OTHER; note = 2'-O-methyl modified nucleotide
  modified_base 70: mod_base = OTHER; note = 2'-O-methyl modified nucleotide
  modified_base 75: mod_base = OTHER; note = 2'-O-methyl modified nucleotide
  modified_base 77: mod_base = OTHER; note = 2'-O-methyl modified nucleotide
  modified_base 80: mod_base = OTHER; note = 2'-O-methyl modified nucleotide
  modified_base 86: mod_base = OTHER; note = 2'-O-methyl modified nucleotide
  modified_base 87: mod_base = OTHER; note = 2'-O-methyl modified nucleotide
  modified_base 89: mod_base = OTHER; note = 2'-O-methyl modified nucleotide
  modified_base 90: mod_base = OTHER; note = 2'-O-methyl modified nucleotide
  modified_base 91: mod_base = OTHER; note = 2'-O-methyl modified nucleotide
  modified_base 92: mod_base = OTHER; note = 2'-O-methyl modified nucleotide
  modified_base 99: mod_base = OTHER; note = nucleotide with phosphorothioate linkage
  modified_base 100: mod_base = OTHER; note = 2'-O-methyl modified nucleotide with phosphorothioate linkage
  modified_base 101: mod_base = OTHER; note = 2'-O-methyl modified nucleotide
aaccctgatcctcttgtcccacaggttgtagctccctgaaaccgttgctacaataaggccgtcgaaagatgtgccgcaacgctctgccttctggcatcgtt

SEQ ID NO: 996 - RNA, 101 nt, synthetic construct
  source 1..101: mol_type = other RNA
  modified_base 1: mod_base = OTHER; note = 2'-O-methyl modified nucleotide with phosphorothioate linkage
  modified_base 2: mod_base = OTHER; note = 2'-O-methyl modified nucleotide with phosphorothioate linkage
  modified_base 3: mod_base = OTHER; note = 2'-O-methyl modified nucleotide with phosphorothioate linkage
  modified_base 4: mod_base = OTHER; note = 2'-O-methyl modified nucleotide
  modified_base 5: mod_base = OTHER; note = 2'-O-methyl modified nucleotide
  modified_base 8: mod_base = OTHER; note = 2'-O-methyl modified nucleotide
  modified_base 9: mod_base = OTHER; note = 2'-O-methyl modified nucleotide
  modified_base 11: mod_base = OTHER; note = 2'-O-methyl modified nucleotide
  modified_base 13: mod_base = OTHER; note = 2'-O-methyl modified nucleotide
  modified_base 18: mod_base = OTHER; note = 2'-O-methyl modified nucleotide
  modified_base 22: mod_base = OTHER; note = 2'-O-methyl modified nucleotide
  modified_base 25: mod_base = OTHER; note = 2'-O-methyl modified nucleotide
  modified_base 29: mod_base = OTHER; note = 2'-O-methyl modified nucleotide
  modified_base 30: mod_base = OTHER; note = 2'-O-methyl modified nucleotide
  modified_base 31: mod_base = OTHER; note = 2'-O-methyl modified nucleotide
  modified_base 32: mod_base = OTHER; note = 2'-O-methyl modified nucleotide
  modified_base 37: mod_base = OTHER; note = 2'-O-methyl modified nucleotide
  modified_base 38: mod_base = OTHER; note = 2'-O-methyl modified nucleotide
  modified_base 39: mod_base = OTHER; note = 2'-O-methyl modified nucleotide
  modified_base 40: mod_base = OTHER; note = 2'-O-methyl modified nucleotide
  modified_base 41: mod_base = OTHER; note = 2'-O-methyl modified nucleotide
  modified_base 42: mod_base = OTHER; note = 2'-O-methyl modified nucleotide
  modified_base 43: mod_base = OTHER; note = 2'-O-methyl modified nucleotide
  modified_base 47: mod_base = OTHER; note = 2'-O-methyl modified nucleotide
  modified_base 48: mod_base = OTHER; note = 2'-O-methyl modified nucleotide
  modified_base 51: mod_base = OTHER; note = 2'-O-methyl modified nucleotide
  modified_base 54: mod_base = OTHER; note = nucleotide with phosphorothioate linkage
  modified_base 58: mod_base = OTHER; note = 2'-O-methyl modified nucleotide
  modified_base 59: mod_base = OTHER; note = 2'-O-methyl modified nucleotide
  modified_base 61: mod_base = OTHER; note = 2'-O-methyl modified nucleotide
  modified_base 62: mod_base = OTHER; note = 2'-O-methyl modified nucleotide
  modified_base 63: mod_base = OTHER; note = 2'-O-methyl modified nucleotide
  modified_base 64: mod_base = OTHER; note = 2'-O-methyl modified nucleotide
  modified_base 65: mod_base = OTHER; note = 2'-O-methyl modified nucleotide
  modified_base 66: mod_base = OTHER; note = 2'-O-methyl modified nucleotide
  modified_base 67: mod_base = OTHER; note = 2'-O-methyl modified nucleotide
  modified_base 68: mod_base = OTHER; note = 2'-O-methyl modified nucleotide
  modified_base 69: mod_base = OTHER; note = 2'-O-methyl modified nucleotide
  modified_base 70: mod_base = OTHER; note = 2'-O-methyl modified nucleotide
  modified_base 75: mod_base = OTHER; note = 2'-O-methyl modified nucleotide
  modified_base 77: mod_base = OTHER; note = 2'-O-methyl modified nucleotide
  modified_base 80: mod_base = OTHER; note = 2'-O-methyl modified nucleotide
  modified_base 86: mod_base = OTHER; note = 2'-O-methyl modified nucleotide
  modified_base 87: mod_base = OTHER; note = 2'-O-methyl modified nucleotide
  modified_base 89: mod_base = OTHER; note = 2'-O-methyl modified nucleotide
  modified_base 90: mod_base = OTHER; note = 2'-O-methyl modified nucleotide
  modified_base 91: mod_base = OTHER; note = 2'-O-methyl modified nucleotide
  modified_base 92: mod_base = OTHER; note = 2'-O-methyl modified nucleotide
  modified_base 99: mod_base = OTHER; note = nucleotide with phosphorothioate linkage
  modified_base 100: mod_base = OTHER; note = 2'-O-methyl modified nucleotide with phosphorothioate linkage
  modified_base 101: mod_base = OTHER; note = 2'-O-methyl modified nucleotide
gccgtgtaccagctgagagactctgttgtagctccctgaaaccgttgctacaataaggccgtcgaaagatgtgccgcaacgctctgccttctggcatcgtt

SEQ ID NO: 997 - RNA, 100 nt, synthetic construct; identical to SEQ ID NO: 993
  source 1..100: mol_type = other RNA
  modified_base 1: mod_base = OTHER; note = 2'-O-methyl modified nucleotide with phosphorothioate linkage
  modified_base 2: mod_base = OTHER; note = 2'-O-methyl modified nucleotide with phosphorothioate linkage
  modified_base 3: mod_base = OTHER; note = 2'-O-methyl modified nucleotide with phosphorothioate linkage
  modified_base 29: mod_base = OTHER; note = 2'-O-methyl modified nucleotide
  modified_base 30: mod_base = OTHER; note = 2'-O-methyl modified nucleotide
  modified_base 31: mod_base = OTHER; note = 2'-O-methyl modified nucleotide
  modified_base 32: mod_base = OTHER; note = 2'-O-methyl modified nucleotide
  modified_base 33: mod_base = OTHER; note = 2'-O-methyl modified nucleotide
  modified_base 34: mod_base = OTHER; note = 2'-O-methyl modified nucleotide
  modified_base 35: mod_base = OTHER; note = 2'-O-methyl modified nucleotide
  modified_base 36: mod_base = OTHER; note = 2'-O-methyl modified nucleotide
  modified_base 37: mod_base = OTHER; note = 2'-O-methyl modified nucleotide
  modified_base 38: mod_base = OTHER; note = 2'-O-methyl modified nucleotide
  modified_base 39: mod_base = OTHER; note = 2'-O-methyl modified nucleotide
  modified_base 40: mod_base = OTHER; note = 2'-O-methyl modified nucleotide
  modified_base 69: mod_base = OTHER; note = 2'-O-methyl modified nucleotide
  modified_base 70: mod_base = OTHER; note = 2'-O-methyl modified nucleotide
  modified_base 71: mod_base = OTHER; note = 2'-O-methyl modified nucleotide
  modified_base 72: mod_base = OTHER; note = 2'-O-methyl modified nucleotide
  modified_base 73: mod_base = OTHER; note = 2'-O-methyl modified nucleotide
  modified_base 74: mod_base = OTHER; note = 2'-O-methyl modified nucleotide
  modified_base 75: mod_base = OTHER; note = 2'-O-methyl modified nucleotide
  modified_base 76: mod_base = OTHER; note = 2'-O-methyl modified nucleotide
  modified_base 77: mod_base = OTHER; note = 2'-O-methyl modified nucleotide
  modified_base 78: mod_base = OTHER; note = 2'-O-methyl modified nucleotide
  modified_base 79: mod_base = OTHER; note = 2'-O-methyl modified nucleotide
  modified_base 80: mod_base = OTHER; note = 2'-O-methyl modified nucleotide
  modified_base 81: mod_base = OTHER; note = 2'-O-methyl modified nucleotide
  modified_base 82: mod_base = OTHER; note = 2'-O-methyl modified nucleotide
  modified_base 83: mod_base = OTHER; note = 2'-O-methyl modified nucleotide
  modified_base 84: mod_base = OTHER; note = 2'-O-methyl modified nucleotide
  modified_base 85: mod_base = OTHER; note = 2'-O-methyl modified nucleotide
  modified_base 86: mod_base = OTHER; note = 2'-O-methyl modified nucleotide
  modified_base 87: mod_base = OTHER; note = 2'-O-methyl modified nucleotide
  modified_base 88: mod_base = OTHER; note = 2'-O-methyl modified nucleotide
  modified_base 89: mod_base = OTHER; note = 2'-O-methyl modified nucleotide
  modified_base 90: mod_base = OTHER; note = 2'-O-methyl modified nucleotide
  modified_base 91: mod_base = OTHER; note = 2'-O-methyl modified nucleotide
  modified_base 92: mod_base = OTHER; note = 2'-O-methyl modified nucleotide
  modified_base 93: mod_base = OTHER; note = 2'-O-methyl modified nucleotide
  modified_base 94: mod_base = OTHER; note = 2'-O-methyl modified nucleotide
  modified_base 95: mod_base = OTHER; note = 2'-O-methyl modified nucleotide
  modified_base 96: mod_base = OTHER; note = 2'-O-methyl modified nucleotide
  modified_base 97: mod_base = OTHER; note = 2'-O-methyl modified nucleotide with phosphorothioate linkage
  modified_base 98: mod_base = OTHER; note = 2'-O-methyl modified nucleotide with phosphorothioate linkage
  modified_base 99: mod_base = OTHER; note = 2'-O-methyl modified nucleotide with phosphorothioate linkage
  modified_base 100: mod_base = OTHER; note = 2'-O-methyl modified nucleotide

SEQ ID NO: 998 - RNA, 100 nt, synthetic construct
  source 1..100: mol_type = other RNA
  modified_base 1: mod_base = OTHER; note = 2'-O-methyl modified nucleotide with phosphorothioate linkage
  modified_base 2: mod_base = OTHER; note = 2'-O-methyl modified nucleotide with phosphorothioate linkage
  modified_base 3: mod_base = OTHER; note = 2'-O-methyl modified nucleotide with phosphorothioate linkage
  modified_base 29: mod_base = OTHER; note = 2'-O-methyl modified nucleotide
  modified_base 30: mod_base = OTHER; note = 2'-O-methyl modified nucleotide
  modified_base 31: mod_base = OTHER; note = 2'-O-methyl modified nucleotide
  modified_base 32: mod_base = OTHER; note = 2'-O-methyl modified nucleotide
  modified_base 33: mod_base = OTHER; note = 2'-O-methyl modified nucleotide
  modified_base 34: mod_base = OTHER; note = 2'-O-methyl modified nucleotide
  modified_base 35: mod_base = OTHER; note = 2'-O-methyl modified nucleotide
  modified_base 36: mod_base = OTHER; note = 2'-O-methyl modified nucleotide
  modified_base 37: mod_base = OTHER; note = 2'-O-methyl modified nucleotide
  modified_base 38: mod_base = OTHER; note = 2'-O-methyl modified nucleotide
  modified_base 39: mod_base = OTHER; note = 2'-O-methyl modified nucleotide
  modified_base 40: mod_base = OTHER; note = 2'-O-methyl modified nucleotide
  modified_base 69: mod_base = OTHER; note = 2'-O-methyl modified nucleotide
  modified_base 70: mod_base = OTHER; note = 2'-O-methyl modified nucleotide
  modified_base 71: mod_base = OTHER; note = 2'-O-methyl modified nucleotide
  modified_base 72: mod_base = OTHER; note = 2'-O-methyl modified nucleotide
  modified_base 73: mod_base = OTHER; note = 2'-O-methyl modified nucleotide
  modified_base 74: mod_base = OTHER; note = 2'-O-methyl modified nucleotide
  modified_base 75: mod_base = OTHER; note = 2'-O-methyl modified nucleotide
  modified_base 76: mod_base = OTHER; note = 2'-O-methyl modified nucleotide
  modified_base 77: mod_base = OTHER; note = 2'-O-methyl modified nucleotide
  modified_base 78: mod_base = OTHER; note = 2'-O-methyl modified nucleotide
  modified_base 79: mod_base = OTHER; note = 2'-O-methyl modified nucleotide
  modified_base 80: mod_base = OTHER; note = 2'-O-methyl modified nucleotide
  modified_base 81: mod_base = OTHER; note = 2'-O-methyl modified nucleotide
  modified_base 82: mod_base = OTHER; note = 2'-O-methyl modified nucleotide
  modified_base 83: mod_base = OTHER; note = 2'-O-methyl modified nucleotide
  modified_base 84: mod_base = OTHER; note = 2'-O-methyl modified nucleotide
  modified_base 85: mod_base = OTHER; note = 2'-O-methyl modified nucleotide
  modified_base 86: mod_base = OTHER; note = 2'-O-methyl modified nucleotide
  modified_base 87: mod_base = OTHER; note = 2'-O-methyl modified nucleotide
  modified_base 88: mod_base = OTHER; note = 2'-O-methyl modified nucleotide
  modified_base 89: mod_base = OTHER; note = 2'-O-methyl modified nucleotide
  modified_base 90: mod_base = OTHER; note = 2'-O-methyl modified nucleotide
  modified_base 91: mod_base = OTHER; note = 2'-O-methyl modified nucleotide
  modified_base 92: mod_base = OTHER; note = 2'-O-methyl modified nucleotide
  modified_base 93: mod_base = OTHER; note = 2'-O-methyl modified nucleotide
  modified_base 94: mod_base = OTHER; note = 2'-O-methyl modified nucleotide
  modified_base 95: mod_base = OTHER; note = 2'-O-methyl modified nucleotide
  modified_base 96: mod_base = OTHER; note = 2'-O-methyl modified nucleotide
  modified_base 97: mod_base = OTHER; note = 2'-O-methyl modified nucleotide with phosphorothioate linkage
  modified_base 98: mod_base = OTHER; note = 2'-O-methyl modified nucleotide with phosphorothioate linkage
  modified_base 99: mod_base = OTHER; note = 2'-O-methyl modified nucleotide with phosphorothioate linkage
  modified_base 100: mod_base = OTHER; note = 2'-O-methyl modified nucleotide
acagcgacgccgcgagccaggttttagagctagaaatagcaagttaaaataaggctagtccgttatcaacttgaaaaagtggcaccgagtcggtgctttt

SEQ ID NO: 999 - RNA, 100 nt, synthetic construct
  source 1..100: mol_type = other RNA
  modified_base 1: mod_base = OTHER; note = 2'-O-methyl modified nucleotide with phosphorothioate linkage
  modified_base 2: mod_base = OTHER; note = 2'-O-methyl modified nucleotide with phosphorothioate linkage
  modified_base 3: mod_base = OTHER; note = 2'-O-methyl modified nucleotide with phosphorothioate linkage
  modified_base 29: mod_base = OTHER; note = 2'-O-methyl modified nucleotide
  modified_base 30: mod_base = OTHER; note = 2'-O-methyl modified nucleotide
  modified_base 31: mod_base = OTHER; note = 2'-O-methyl modified nucleotide
  modified_base 32: mod_base = OTHER; note = 2'-O-methyl modified nucleotide
  modified_base 33: mod_base = OTHER; note = 2'-O-methyl modified nucleotide
  modified_base 34: mod_base = OTHER; note = 2'-O-methyl modified nucleotide
  modified_base 35: mod_base = OTHER; note = 2'-O-methyl modified nucleotide
  modified_base 36: mod_base = OTHER; note = 2'-O-methyl modified nucleotide
  modified_base 37: mod_base = OTHER; note = 2'-O-methyl modified nucleotide
  modified_base 38: mod_base = OTHER; note = 2'-O-methyl modified nucleotide
  modified_base 39: mod_base = OTHER; note = 2'-O-methyl modified nucleotide
  modified_base 40: mod_base = OTHER; note = 2'-O-methyl modified nucleotide
  modified_base 69: mod_base = OTHER; note = 2'-O-methyl modified nucleotide
  modified_base 70: mod_base = OTHER; note = 2'-O-methyl modified nucleotide
  modified_base 71: mod_base = OTHER; note = 2'-O-methyl modified nucleotide
  modified_base 72: mod_base = OTHER; note = 2'-O-methyl modified nucleotide
  modified_base 73: mod_base = OTHER; note = 2'-O-methyl modified nucleotide
  modified_base 74: mod_base = OTHER; note = 2'-O-methyl modified nucleotide
  modified_base 75: mod_base = OTHER; note = 2'-O-methyl modified nucleotide
  modified_base 76: mod_base = OTHER; note = 2'-O-methyl modified nucleotide
  modified_base 77: mod_base = OTHER; note = 2'-O-methyl modified nucleotide
  modified_base 78: mod_base = OTHER; note = 2'-O-methyl modified nucleotide
  modified_base 79: mod_base = OTHER; note = 2'-O-methyl modified nucleotide
  modified_base 80: mod_base = OTHER; note = 2'-O-methyl modified nucleotide
  modified_base 81: mod_base = OTHER; note = 2'-O-methyl modified nucleotide
  modified_base 82: mod_base = OTHER; note = 2'-O-methyl modified nucleotide
  modified_base 83: mod_base = OTHER; note = 2'-O-methyl modified nucleotide
  modified_base 84: mod_base = OTHER; note = 2'-O-methyl modified nucleotide
  modified_base 85: mod_base = OTHER; note = 2'-O-methyl modified nucleotide
  modified_base 86: mod_base = OTHER; note = 2'-O-methyl modified nucleotide
  modified_base 87: mod_base = OTHER; note = 2'-O-methyl modified nucleotide
  modified_base 88: mod_base = OTHER; note = 2'-O-methyl modified nucleotide
  modified_base 89: mod_base = OTHER; note = 2'-O-methyl modified nucleotide
  modified_base 90: mod_base = OTHER; note = 2'-O-methyl modified nucleotide
  modified_base 91: mod_base = OTHER; note = 2'-O-methyl modified nucleotide
  modified_base 92: mod_base = OTHER; note = 2'-O-methyl modified nucleotide
  modified_base 93: mod_base = OTHER; note = 2'-O-methyl modified nucleotide
  modified_base 94: mod_base = OTHER; note = 2'-O-methyl modified nucleotide
  modified_base 95: mod_base = OTHER; note = 2'-O-methyl modified nucleotide
  modified_base 96: mod_base = OTHER; note = 2'-O-methyl modified nucleotide
  modified_base 97: mod_base = OTHER; note = 2'-O-methyl modified nucleotide with phosphorothioate linkage
  modified_base 98: mod_base = OTHER; note = 2'-O-methyl modified nucleotide with phosphorothioate linkage
  modified_base 99: mod_base = OTHER; note = 2'-O-methyl modified nucleotide with phosphorothioate linkage
  modified_base 100: mod_base = OTHER; note = 2'-O-methyl modified nucleotide
agagtctctcagctggtacagttttagagctagaaatagcaagttaaaataaggctagtccgttatcaacttgaaaaagtggcaccgagtcggtgctttt

SEQ ID NO: 1000 - skipped

SEQ ID NO: 1001 - RNA, 100 nt, synthetic construct
  source 1..100: mol_type = other RNA
ccagcctggacgcaggcaccgttttagagctagaaatagcaagttaaaataaggctagtccgttatcaacttgaaaaagtggcaccgagtcggtgctttt

SEQ ID NO: 1002 - RNA, 100 nt, synthetic construct
  source 1..100: mol_type = other RNA
aggcgctttgcatctctcatgttttagagctagaaatagcaagttaaaataaggctagtccgttatcaacttgaaaaagtggcaccgagtcggtgctttt

SEQ ID NO: 1003 - RNA, 100 nt, synthetic construct
  source 1..100: mol_type = other RNA
aacaatgcccacgatggggagttttagagctagaaatagcaagttaaaataaggctagtccgttatcaacttgaaaaagtggcaccgagtcggtgctttt

SEQ ID NO: 1004 - RNA, 100 nt, synthetic construct
  source 1..100: mol_type = other RNA
ccagacaccagcctggacgcgttttagagctagaaatagcaagttaaaataaggctagtccgttatcaacttgaaaaagtggcaccgagtcggtgctttt

SEQ ID NO: 1005 - RNA, 100 nt, synthetic construct
  source 1..100: mol_type = other RNA
ccatctcctataggtcgccggttttagagctagaaatagcaagttaaaataaggctagtccgttatcaacttgaaaaagtggcaccgagtcggtgctttt

SEQ ID NO: 1006 - RNA, 100 nt, synthetic construct
  source 1..100: mol_type = other RNA
cttctctctaggacaattaagttttagagctagaaatagcaagttaaaataaggctagtccgttatcaacttgaaaaagtggcaccgagtcggtgctttt

SEQ ID NO: 1007 - RNA, 100 nt, synthetic construct
  source 1..100: mol_type = other RNA
ccccatctcctataggtcgcgttttagagctagaaatagcaagttaaaataaggctagtccgttatcaacttgaaaaagtggcaccgagtcggtgctttt

SEQ ID NO: 1008 - RNA, 100 nt, synthetic construct
  source 1..100: mol_type = other RNA
ggatctcggacccggagactgttttagagctagaaatagcaagttaaaataaggctagtccgttatcaacttgaaaaagtggcaccgagtcggtgctttt

SEQ ID NO: 1009 - RNA, 100 nt, synthetic construct
  source 1..100: mol_type = other RNA
cttcctcccagtcccctcacgttttagagctagaaatagcaagttaaaataaggctagtccgttatcaacttgaaaaagtggcaccgagtcggtgctttt

SEQ ID NO: 1010 - RNA, 100 nt, synthetic construct
  source 1..100: mol_type = other RNA
ctcctgtcccacgtctcctggttttagagctagaaatagcaagttaaaataaggctagtccgttatcaacttgaaaaagtggcaccgagtcggtgctttt

SEQ ID NO: 1011 - RNA, 100 nt, synthetic construct
  source 1..100: mol_type = other RNA
ccattttcctcctcttctcggttttagagctagaaatagcaagttaaaataaggctagtccgttatcaacttgaaaaagtggcaccgagtcggtgctttt

SEQ ID NO: 1012 - RNA, 100 nt, synthetic construct
  source 1..100: mol_type = other RNA
ggttcccaaggctgctgcaggttttagagctagaaatagcaagttaaaataaggctagtccgttatcaacttgaaaaagtggcaccgagtcggtgctttt

SEQ ID NO: 1013 - RNA, 100 nt, synthetic construct
  source 1..100: mol_type = other RNA
acatgccatgtacagcatgagttttagagctagaaatagcaagttaaaataaggctagtccgttatcaacttgaaaaagtggcaccgagtcggtgctttt

SEQ ID NO: 1014 - RNA, 100 nt, synthetic construct
  source 1..100: mol_type = other RNA
cggttcccaaggctgctgcagttttagagctagaaatagcaagttaaaataaggctagtccgttatcaacttgaaaaagtggcaccgagtcggtgctttt

SEQ ID NO: 1015 - RNA, 100 nt, synthetic construct
  source 1..100: mol_type = other RNA
aacgcgcctggggctctcgcgttttagagctagaaatagcaagttaaaataaggctagtccgttatcaacttgaaaaagtggcaccgagtcggtgctttt

SEQ ID NO: 1016 - RNA, 100 nt, synthetic construct
  source 1..100: mol_type = other RNA
tggtgggggtgggagtgtgggttttagagctagaaatagcaagttaaaataaggctagtccgttatcaacttgaaaaagtggcaccgagtcggtgctttt

SEQ ID NO: 1017 - RNA, 100 nt, synthetic construct
  source 1..100: mol_type = other RNA
gagtctctgagcggggaacagttttagagctagaaatagcaagttaaaataaggctagtccgttatcaacttgaaaaagtggcaccgagtcggtgctttt

SEQ ID NO: 1018 - RNA, 100 nt, synthetic construct
  source 1..100: mol_type = other RNA
gggaggagcgaggggaccgcgttttagagctagaaatagcaagttaaaataaggctagtccgttatcaacttgaaaaagtggcaccgagtcggtgctttt

SEQ ID NO: 1019 - RNA, 100 nt, synthetic construct
  source 1..100: mol_type = other RNA
tgaggggactgggaggaagcgttttagagctagaaatagcaagttaaaataaggctagtccgttatcaacttgaaaaagtggcaccgagtcggtgctttt

SEQ ID NO: 1020 - RNA, 100 nt, synthetic construct
  source 1..100: mol_type = other RNA
ctgcgtccaggctggtgtctgttttagagctagaaatagcaagttaaaataaggctagtccgttatcaacttgaaaaagtggcaccgagtcggtgctttt

SEQ ID NO: 1021 - RNA, 100 nt, synthetic construct
  source 1..100: mol_type = other RNA
cctcgaccggcgagagccccgttttagagctagaaatagcaagttaaaataaggctagtccgttatcaacttgaaaaagtggcaccgagtcggtgctttt

SEQ ID NO: 1022 - RNA, 100 nt, synthetic construct
  source 1..100: mol_type = other RNA
aacacgaggaaagcaagtgtgttttagagctagaaatagcaagttaaaataaggctagtccgttatcaacttgaaaaagtggcaccgagtcggtgctttt

SEQ ID NO: 1023 - RNA, 100 nt, synthetic construct
  source 1..100: mol_type = other RNA
actttacctccactcagatcgttttagagctagaaatagcaagttaaaataaggctagtccgttatcaacttgaaaaagtggcaccgagtcggtgctttt

SEQ ID NO: 1024 - RNA, 100 nt, synthetic construct
  source 1..100: mol_type = other RNA
tctgctcctgatctgagtgggttttagagctagaaatagcaagttaaaataaggctagtccgttatcaacttgaaaaagtggcaccgagtcggtgctttt

SEQ ID NO: 1025 - RNA, 100 nt, synthetic construct
  source 1..100: mol_type = other RNA
atctcggacccggagactcggttttagagctagaaatagcaagttaaaataaggctagtccgttatcaacttgaaaaagtggcaccgagtcggtgctttt

SEQ ID NO: 1026 - RNA, 100 nt, synthetic construct
  source 1..100: mol_type = other RNA
cctggggctctcgccggtcggttttagagctagaaatagcaagttaaaataaggctagtccgttatcaacttgaaaaagtggcaccgagtcggtgctttt

SEQ ID NO: 1027 - RNA, 100 nt, synthetic construct
  source 1..100: mol_type = other RNA
ctggtcacatgggtggtcctgttttagagctagaaatagcaagttaaaataaggctagtccgttatcaacttgaaaaagtggcaccgagtcggtgctttt

SEQ ID NO: 1028 - RNA, 100 nt, synthetic construct
  source 1..100: mol_type = other RNA
ctcctataggtcgccggggagttttagagctagaaatagcaagttaaaataaggctagtccgttatcaacttgaaaaagtggcaccgagtcggtgctttt

SEQ ID NO: 1029 - RNA, 100 nt, synthetic construct
  source 1..100: mol_type = other RNA
gtaaagtgactcagaagtgcgttttagagctagaaatagcaagttaaaataaggctagtccgttatcaacttgaaaaagtggcaccgagtcggtgctttt

SEQ ID NO: 1030 - RNA, 100 nt, synthetic construct
  source 1..100: mol_type = other RNA
acacaggggctaacgcagccgttttagagctagaaatagcaagttaaaataaggctagtccgttatcaacttgaaaaagtggcaccgagtcggtgctttt

SEQ ID NO: 1031 - RNA, 100 nt, synthetic construct
  source 1..100: mol_type = other RNA
atacttctggaaattcctttgttttagagctagaaatagcaagttaaaataaggctagtccgttatcaacttgaaaaagtggcaccgagtcggtgctttt

SEQ ID NO: 1032 - RNA, 100 nt, synthetic construct
  source 1..100: mol_type = other RNA
gtcctagcagttgtggtcatgttttagagctagaaatagcaagttaaaataaggctagtccgttatcaacttgaaaaagtggcaccgagtcggtgctttt

SEQ ID NO: 1033 - RNA, 100 nt, synthetic construct
  source 1..100: mol_type = other RNA
cccatctcctataggtcgccgttttagagctagaaatagcaagttaaaataaggctagtccgttatcaacttgaaaaagtggcaccgagtcggtgctttt

SEQ ID NO: 1034 - RNA, 100 nt, synthetic construct
  source 1..100: mol_type = other RNA
cgacctataggagatggggagttttagagctagaaatagcaagttaaaataaggctagtccgttatcaacttgaaaaagtggcaccgagtcggtgctttt

SEQ ID NO: 1035 - RNA, 100 nt, synthetic construct
  source 1..100: mol_type = other RNA
gaagtatgactacagacccagttttagagctagaaatagcaagttaaaataaggctagtccgttatcaacttgaaaaagtggcaccgagtcggtgctttt

SEQ ID NO: 1036 - RNA, 100 nt, synthetic construct
  source 1..100: mol_type = other RNA
ctccgatgaccacaactgctgttttagagctagaaatagcaagttaaaataaggctagtccgttatcaacttgaaaaagtggcaccgagtcggtgctttt

SEQ ID NO: 1037 - RNA, 100 nt, synthetic construct
  source 1..100: mol_type = other RNA
agttgtggtcatcggagctggttttagagctagaaatagcaagttaaaataaggctagtccgttatcaacttgaaaaagtggcaccgagtcggtgctttt

SEQ ID NO: 1038 - RNA, 100 nt, synthetic construct
  source 1..100: mol_type = other RNA
tacttctggaaattccttttgttttagagctagaaatagcaagttaaaataaggctagtccgttatcaacttgaaaaagtggcaccgagtcggtgctttt

SEQ ID NO: 1039 - RNA, 100 nt, synthetic construct
  source 1..100: mol_type = other RNA
cacatgccatgtacagcatggttttagagctagaaatagcaagttaaaataaggctagtccgttatcaacttgaaaaagtggcaccgagtcggtgctttt

SEQ ID NO: 1040 - RNA, 100 nt, synthetic construct
  source 1..100: mol_type = other RNA
ggagcgaggggaccgcaggcgttttagagctagaaatagcaagttaaaataaggctagtccgttatcaacttgaaaaagtggcaccgagtcggtgctttt

SEQ ID NO: 1041 - RNA, 100 nt, synthetic construct
  source 1..100: mol_type = other RNA
aggaaaagtcacggttcccagttttagagctagaaatagcaagttaaaataaggctagtccgttatcaacttgaaaaagtggcaccgagtcggtgctttt

SEQ ID NO: 1042 - RNA, 100 nt, synthetic construct
  source 1..100: mol_type = other RNA
gagccttccccatctcctatgttttagagctagaaatagcaagttaaaataaggctagtccgttatcaacttgaaaaagtggcaccgagtcggtgctttt

SEQ ID NO: 1043 - RNA, 100 nt, synthetic construct
  source 1..100: mol_type = other RNA
gactccccatcccccacgtagttttagagctagaaatagcaagttaaaataaggctagtccgttatcaacttgaaaaagtggcaccgagtcggtgctttt

SEQ ID NO: 1044 - RNA, 100 nt, synthetic construct
  source 1..100: mol_type = other RNA
cccggcgacctataggagatgttttagagctagaaatagcaagttaaaataaggctagtccgttatcaacttgaaaaagtggcaccgagtcggtgctttt

SEQ ID NO: 1045 - RNA, 100 nt, synthetic construct
  source 1..100: mol_type = other RNA
acggttcccaaggctgctgcgttttagagctagaaatagcaagttaaaataaggctagtccgttatcaacttgaaaaagtggcaccgagtcggtgctttt

SEQ ID NO: 1046 - RNA, 100 nt, synthetic construct
  source 1..100: mol_type = other RNA
gggagtcgtgacctgcgcccgttttagagctagaaatagcaagttaaaataaggctagtccgttatcaacttgaaaaagtggcaccgagtcggtgctttt

SEQ ID NO: 1047 - RNA, 100 nt, synthetic construct
  source 1..100: mol_type = other RNA
gagcgaggggaccgcaggcggttttagagctagaaatagcaagttaaaataaggctagtccgttatcaacttgaaaaagtggcaccgagtcggtgctttt

SEQ ID NO: 1048 - RNA, 100 nt, synthetic construct
  source 1..100: mol_type = other RNA
cctggctgtcctagcagttggttttagagctagaaatagcaagttaaaataaggctagtccgttatcaacttgaaaaagtggcaccgagtcggtgctttt

SEQ ID NO: 1049 - RNA, 91 nt, synthetic construct
  source 1..91: mol_type = other RNA
acatgccatgtacagcatgagttttagagctagaaatagcaagttaaaataaggctagtccgttatcacgaaagggcaccgagtcggtgct

SEQ ID NO: 1050 - RNA, 91 nt, synthetic construct
  source 1..91: mol_type = other RNA
aacaatgcccacgatggggagttttagagctagaaatagcaagttaaaataaggctagtccgttatcacgaaagggcaccgagtcggtgct

SEQ ID NO: 1051 - RNA, 91 nt, synthetic construct
  source 1..91: mol_type = other RNA
ctccgatgaccacaactgctgttttagagctagaaatagcaagttaaaataaggctagtccgttatcacgaaagggcaccgagtcggtgct

SEQ ID NO: 1052 - RNA, 91 nt, synthetic construct
  source 1..91: mol_type = other RNA
cacatgccatgtacagcatggttttagagctagaaatagcaagttaaaataaggctagtccgttatcacgaaagggcaccgagtcggtgct

SEQ ID NO: 1053 - RNA, 91 nt, synthetic construct
  source 1..91: mol_type = other RNA
ccggacgggcgcctcctccggttttagagctagaaatagcaagttaaaataaggctagtccgttatcacgaaagggcaccgagtcggtgct

SEQ ID NO: 1054 - RNA, 91 nt, synthetic construct
  source 1..91: mol_type = other RNA
cggacgggcgcctcctccgcgttttagagctagaaatagcaagttaaaataaggctagtccgttatcacgaaagggcaccgagtcggtgct

SEQ ID NO: 1055 - RNA, 91 nt, synthetic construct
  source 1..91: mol_type = other RNA
gtggactgggaagacggctcgttttagagctagaaatagcaagttaaaataaggctagtccgttatcacgaaagggcaccgagtcggtgct

SEQ ID NO: 1056 - RNA, 91 nt, synthetic construct
  source 1..91: mol_type = other RNA
tggactgggaagacggctctgttttagagctagaaatagcaagttaaaataaggctagtccgttatcacgaaagggcaccgagtcggtgct

SEQ ID NO: 1057 - RNA, 91 nt, synthetic construct
  source 1..91: mol_type = other RNA
gtacggctgcgacgtggggcgttttagagctagaaatagcaagttaaaataaggctagtccgttatcacgaaagggcaccgagtcggtgct

SEQ ID NO: 1058 - RNA, 91 nt, synthetic construct
  source 1..91: mol_type = other RNA
aatgcccacgatggggacgggttttagagctagaaatagcaagttaaaataaggctagtccgttatcacgaaagggcaccgagtcggtgct

SEQ ID NO: 1059 - RNA, 91 nt, synthetic construct
  source 1..91: mol_type = other RNA
tcgctgctgtgatgtgtagggttttagagctagaaatagcaagttaaaataaggctagtccgttatcacgaaagggcaccgagtcggtgct

SEQ ID NO: 1060 - RNA, 91 nt, synthetic construct
  source 1..91: mol_type = other RNA
tggtcgctgctgtgatgtgtgttttagagctagaaatagcaagttaaaataaggctagtccgttatcacgaaagggcaccgagtcggtgct

SEQ ID NO: 1061 - RNA, 91 nt, synthetic construct
  source 1..91: mol_type = other RNA
ccaggcagcgacagtgcccagttttagagctagaaatagcaagttaaaataaggctagtccgttatcacgaaagggcaccgagtcggtgct

SEQ ID NO: 1062 - RNA, 91 nt, synthetic construct
  source 1..91: mol_type = other RNA
ccctgggcactgtcgctgccgttttagagctagaaatagcaagttaaaataaggctagtccgttatcacgaaagggcaccgagtcggtgct

SEQ ID NO: 1063 - RNA, 91 nt, synthetic construct
  source 1..91: mol_type = other RNA
tccaggcagcgacagtgcccgttttagagctagaaatagcaagttaaaataaggctagtccgttatcacgaaagggcaccgagtcggtgct

SEQ ID NO: 1064 - RNA, 91 nt, synthetic construct
  source 1..91: mol_type = other RNA
cacgatggggacggtggactgttttagagctagaaatagcaagttaaaataaggctagtccgttatcacgaaagggcaccgagtcggtgct

SEQ ID NO: 1065 - RNA, 91 nt, synthetic construct
  source 1..91: mol_type = other RNA
cagtccaccgtccccatcgtgttttagagctagaaatagcaagttaaaataaggctagtccgttatcacgaaagggcaccgagtcggtgct

SEQ ID NO: 1066 - RNA, 91 nt, synthetic construct
  source 1..91: mol_type = other RNA
ccacgatggggacggtggacgttttagagctagaaatagcaagttaaaataaggctagtccgttatcacgaaagggcaccgagtcggtgct

SEQ ID NO: 1067 - RNA, 91 nt, synthetic construct
  source 1..91: mol_type = other RNA
ccagtccaccgtccccatcggttttagagctagaaatagcaagttaaaataaggctagtccgttatcacgaaagggcaccgagtcggtgct

SEQ ID NO: 1068 - RNA, 91 nt, synthetic construct
  source 1..91: mol_type = other RNA
gggacggtggactgggaagagttttagagctagaaatagcaagttaaaataaggctagtccgttatcacgaaagggcaccgagtcggtgct

SEQ ID NO: 1069 - RNA, 91 nt, synthetic construct
  source 1..91: mol_type = other RNA
cgaagcccctcaccctgagagttttagagctagaaatagcaagttaaaataaggctagtccgttatcacgaaagggcaccgagtcggtgct

SEQ ID NO: 1070 - RNA, 91 nt, synthetic construct
  source 1..91: mol_type = other RNA
gaagcccctcaccctgagatgttttagagctagaaatagcaagttaaaataaggctagtccgttatcacgaaagggcaccgagtcggtgct

SEQ ID NO: 1071 - RNA, 91 nt, synthetic construct; identical to SEQ ID NO: 1050
  source 1..91: mol_type = other RNA

SEQ ID NO: 1072 - RNA, 91 nt, synthetic construct
  source 1..91: mol_type = other RNA
agttgtggtcatcggagctggttttagagctagaaatagcaagttaaaataaggctagtccgttatcacgaaagggcaccgagtcggtgct

SEQ ID NO: 1073 - RNA, 91 nt, synthetic construct
  source 1..91: mol_type = other RNA
cagcaacaatgcccacgatggttttagagctagaaatagcaagttaaaataaggctagtccgttatcacgaaagggcaccgagtcggtgct

SEQ ID NO: 1074 - RNA, 91 nt, synthetic construct
  source 1..91: mol_type = other RNA
catgccatgtacagcatgaggttttagagctagaaatagcaagttaaaataaggctagtccgttatcacgaaagggcaccgagtcggtgct

SEQ ID NO: 1075 - RNA, 91 nt, synthetic construct
  source 1..91: mol_type = other RNA
ccacaactgctaggacagccgttttagagctagaaatagcaagttaaaataaggctagtccgttatcacgaaagggcaccgagtcggtgct

SEQ ID NO: 1076 - RNA, 91 nt, synthetic construct
  source 1..91: mol_type = other RNA
ccagcaacaatgcccacgatgttttagagctagaaatagcaagttaaaataaggctagtccgttatcacgaaagggcaccgagtcggtgct

SEQ ID NO: 1077 - RNA, 91 nt, synthetic construct
  source 1..91: mol_type = other RNA
cccatcgtgggcattgttgcgttttagagctagaaatagcaagttaaaataaggctagtccgttatcacgaaagggcaccgagtcggtgct

SEQ ID NO: 1078 - RNA, 91 nt, synthetic construct
  source 1..91: mol_type = other RNA
cctggctgtcctagcagttggttttagagctagaaatagcaagttaaaataaggctagtccgttatcacgaaagggcaccgagtcggtgct

SEQ ID NO: 1079 - RNA, 91 nt, synthetic construct
  source 1..91: mol_type = other RNA
cgtgggcattgttgctggccgttttagagctagaaatagcaagttaaaataaggctagtccgttatcacgaaagggcaccgagtcggtgct

SEQ ID NO: 1080 - RNA, 91 nt, synthetic construct; identical to SEQ ID NO: 1051
  source 1..91: mol_type = other RNA

SEQ ID NO: 1081 - RNA, 91 nt, synthetic construct
  source 1..91: mol_type = other RNA
cttgtggagaccagaccagcgttttagagctagaaatagcaagttaaaataaggctagtccgttatcacgaaagggcaccgagtcggtgct

SEQ ID NO: 1082 - RNA, 91 nt, synthetic construct
  source 1..91: mol_type = other RNA
gcagcccctcatgctgtacagttttagagctagaaatagcaagttaaaataaggctagtccgttatcacgaaagggcaccgagtcggtgct

SEQ ID NO: 1083 - RNA, 91 nt, synthetic construct
  source 1..91: mol_type = other RNA
gccagcaacaatgcccacgagttttagagctagaaatagcaagttaaaataaggctagtccgttatcacgaaagggcaccgagtcggtgct

SEQ ID NO: 1084 - RNA, 91 nt, synthetic construct
  source 1..91: mol_type = other RNA
gtcctagcagttgtggtcatgttttagagctagaaatagcaagttaaaataaggctagtccgttatcacgaaagggcaccgagtcggtgct

SEQ ID NO: 1085 - RNA, 91 nt, synthetic construct
  source 1..91: mol_type = other RNA
gtgtctctcacagcttgaaagttttagagctagaaatagcaagttaaaataaggctagtccgttatcacgaaagggcaccgagtcggtgct

SEQ ID NO: 1086 - RNA, 91 nt, synthetic construct
  source 1..91: mol_type = other RNA
tgtgtctttggggggtctgagttttagagctagaaatagcaagttaaaataaggctagtccgttatcacgaaagggcaccgagtcggtgct

SEQ ID NO: 1087 - RNA, 91 nt, synthetic construct
  source 1..91: mol_type = other RNA
ctcctcagacgccgagatgcgttttagagctagaaatagcaagttaaaataaggctagtccgttatcacgaaagggcaccgagtcggtgct

SEQ ID NO: 1088 - RNA, 91 nt, synthetic construct
  source 1..91: mol_type = other RNA
gagatagaaccttccagaaggttttagagctagaaatagcaagttaaaataaggctagtccgttatcacgaaagggcaccgagtcggtgct

SEQ ID NO: 1089 - RNA, 91 nt, synthetic construct
  source 1..91: mol_type = other RNA
ggttctatctcctgctggtcgttttagagctagaaatagcaagttaaaataaggctagtccgttatcacgaaagggcaccgagtcggtgct

SEQ ID NO: 1090 - RNA, 91 nt, synthetic construct
  source 1..91: mol_type = other RNA
tggaaggttctatctcctgcgttttagagctagaaatagcaagttaaaataaggctagtccgttatcacgaaagggcaccgagtcggtgct

SEQ ID NO: 1091 - RNA, 91 nt, synthetic construct
  source 1..91: mol_type = other RNA
agatagaaccttccagaagtgttttagagctagaaatagcaagttaaaataaggctagtccgttatcacgaaagggcaccgagtcggtgct

SEQ ID NO: 1092-1100 - skipped (9 entries)

SEQ ID NO: 1101 - RNA, 101 nt, synthetic construct
  source 1..101: mol_type = other RNA
cttctggagaagagcagagatacagttgtagctccctgaaaccgttgctacaataaggccgtcgaaagatgtgccgcaacgctctgccttctggcatcgtt

SEQ ID NO: 1102 - RNA, 101 nt, synthetic construct
  source 1..101: mol_type = other RNA
cacatgccatgtacagcatgaggggttgtagctccctgaaaccgttgctacaataaggccgtcgaaagatgtgccgcaacgctctgccttctggcatcgtt

SEQ ID NO: 1103 - RNA, 101 nt, synthetic construct
  source 1..101: mol_type = other RNA
cactgacctggcagcgggatggcggttgtagctccctgaaaccgttgctacaataaggccgtcgaaagatgtgccgcaacgctctgccttctggcatcgtt

SEQ ID NO: 1104 - RNA, 101 nt, synthetic construct
  source 1..101: mol_type = other RNA
ccatgtacagcatgaggggctgccgttgtagctccctgaaaccgttgctacaataaggccgtcgaaagatgtgccgcaacgctctgccttctggcatcgtt

SEQ ID NO: 1105 - RNA, 101 nt, synthetic construct
  source 1..101: mol_type = other RNA
cttacacgcagcctgagagtagctgttgtagctccctgaaaccgttgctacaataaggccgtcgaaagatgtgccgcaacgctctgccttctggcatcgtt

SEQ ID NO: 1106 - RNA, 101 nt, synthetic construct
  source 1..101: mol_type = other RNA
agctgcccacttctggaaggttctgttgtagctccctgaaaccgttgctacaataaggccgtcgaaagatgtgccgcaacgctctgccttctggcatcgtt

SEQ ID NO: 1107 - RNA, 101 nt, synthetic construct
  source 1..101: mol_type = other RNA
cttccagaagtgggcagctgtggtgttgtagctccctgaaaccgttgctacaataaggccgtcgaaagatgtgccgcaacgctctgccttctggcatcgtt

SEQ ID NO: 1108 - RNA, 101 nt, synthetic construct
  source 1..101: mol_type = other RNA
ccatctcagggtgaggggcttcgggttgtagctccctgaaaccgttgctacaataaggccgtcgaaagatgtgccgcaacgctctgccttctggcatcgtt

SEQ ID NO: 1109 - RNA, 101 nt, synthetic construct
  source 1..101: mol_type = other RNA
catctcagggtgaggggcttcggcgttgtagctccctgaaaccgttgctacaataaggccgtcgaaagatgtgccgcaacgctctgccttctggcatcgtt

SEQ ID NO: 1110 - RNA, 101 nt, synthetic construct
  source 1..101: mol_type = other RNA
cagcatgaggggctgccgaagcccgttgtagctccctgaaaccgttgctacaataaggccgtcgaaagatgtgccgcaacgctctgccttctggcatcgtt

SEQ ID NO: 1111 - RNA, 101 nt, synthetic construct
  source 1..101: mol_type = other RNA
cccatctcagggtgaggggcttcggttgtagctccctgaaaccgttgctacaataaggccgtcgaaagatgtgccgcaacgctctgccttctggcatcgtt

SEQ ID NO: 1112 - RNA, 101 nt, synthetic construct
  source 1..101: mol_type = other RNA
atgtacagcatgaggggctgccgagttgtagctccctgaaaccgttgctacaataaggccgtcgaaagatgtgccgcaacgctctgccttctggcatcgtt

SEQ ID NO: 1113 - RNA, 101 nt, synthetic construct
  source 1..101: mol_type = other RNA
catgtacagcatgaggggctgccggttgtagctccctgaaaccgttgctacaataaggccgtcgaaagatgtgccgcaacgctctgccttctggcatcgtt

SEQ ID NO: 1114 - RNA, 101 nt, synthetic construct
  source 1..101: mol_type = other RNA
agatcacccagcgcaagtgggagggttgtagctccctgaaaccgttgctacaataaggccgtcgaaagatgtgccgcaacgctctgccttctggcatcgtt

SEQ ID NO: 1115 - RNA, 101 nt, synthetic construct
  source 1..101: mol_type = other RNA
cagatcacccagcgcaagtgggaggttgtagctccctgaaaccgttgctacaataaggccgtcgaaagatgtgccgcaacgctctgccttctggcatcgtt

SEQ ID NO: 1116 - RNA, 101 nt, synthetic construct
  source 1..101: mol_type = other RNA
gcctcccacttgcgctgggtgatcgttgtagctccctgaaaccgttgctacaataaggccgtcgaaagatgtgccgcaacgctctgccttctggcatcgtt

SEQ ID NO: 1117 - RNA, 101 nt, synthetic construct
  source 1..101: mol_type = other RNA
cccaatactccggcccctcctgctgttgtagctccctgaaaccgttgctacaataaggccgtcgaaagatgtgccgcaacgctctgccttctggcatcgtt

SEQ ID NO: 1118 - RNA, 101 nt, synthetic construct
  source 1..101: mol_type = other RNA
cactcaccggcccaggtctcggtcgttgtagctccctgaaaccgttgctacaataaggccgtcgaaagatgtgccgcaacgctctgccttctggcatcgtt

SEQ ID NO: 1119 - RNA, 101 nt, synthetic construct
  source 1..101: mol_type = other RNA
tagagcaggaggggccggagtattgttgtagctccctgaaaccgttgctacaataaggccgtcgaaagatgtgccgcaacgctctgccttctggcatcgtt

SEQ ID NO: 1120 - RNA, 101 nt, synthetic construct
  source 1..101: mol_type = other RNA
ccggcccaggtctcggtcagggccgttgtagctccctgaaaccgttgctacaataaggccgtcgaaagatgtgccgcaacgctctgccttctggcatcgtt

SEQ ID NO: 1121 - RNA, 101 nt, synthetic construct
  source 1..101: mol_type = other RNA
accacttacacgcagcctgagagtgttgtagctccctgaaaccgttgctacaataaggccgtcgaaagatgtgccgcaacgctctgccttctggcatcgtt

SEQ ID NO: 1122 - RNA, 101 nt, synthetic construct
  source 1..101: mol_type = other RNA
ccacttacacgcagcctgagagtagttgtagctccctgaaaccgttgctacaataaggccgtcgaaagatgtgccgcaacgctctgccttctggcatcgtt

SEQ ID NO: 1123 - RNA, 101 nt, synthetic construct
  source 1..101: mol_type = other RNA
tatctgcggagccactccacgcacgttgtagctccctgaaaccgttgctacaataaggccgtcgaaagatgtgccgcaacgctctgccttctggcatcgtt

SEQ ID NO: 1124 - RNA, 101 nt, synthetic construct
  source 1..101: mol_type = other RNA
agcctgagagtagctccctcctttgttgtagctccctgaaaccgttgctacaataaggccgtcgaaagatgtgccgcaacgctctgccttctggcatcgtt

SEQ ID NO: 1125 - RNA, 101 nt, synthetic construct
  source 1..101: mol_type = other RNA
cctgagtttggtcctcgccatcccgttgtagctccctgaaaccgttgctacaataaggccgtcgaaagatgtgccgcaacgctctgccttctggcatcgtt

SEQ ID NO: 1126 - RNA, 101 nt, synthetic construct
  source 1..101: mol_type = other RNA
gtgtatctctgctcttctccagaagttgtagctccctgaaaccgttgctacaataaggccgtcgaaagatgtgccgcaacgctctgccttctggcatcgtt

SEQ ID NO: 1127 - RNA, 101 nt, synthetic construct
  source 1..101: mol_type = other RNA
cttctccagaaggcaccaccacaggttgtagctccctgaaaccgttgctacaataaggccgtcgaaagatgtgccgcaacgctctgccttctggcatcgtt

SEQ ID NO: 1128 - RNA, 101 nt, synthetic construct
  source 1..101: mol_type = other RNA
tacatggcatgtgtatctctgctcgttgtagctccctgaaaccgttgctacaataaggccgtcgaaagatgtgccgcaacgctctgccttctggcatcgtt

SEQ ID NO: 1129 - RNA, 101 nt, synthetic construct
  source 1..101: mol_type = other RNA
tatctctgctcttctccagaaggcgttgtagctccctgaaaccgttgctacaataaggccgtcgaaagatgtgccgcaacgctctgccttctggcatcgtt

SEQ ID NO: 1130 - RNA, 101 nt, synthetic construct
  source 1..101: mol_type = other RNA
tgctaggacagccaggccagcaacgttgtagctccctgaaaccgttgctacaataaggccgtcgaaagatgtgccgcaacgctctgccttctggcatcgtt

SEQ ID NO: 1131 - RNA, 101 nt, synthetic construct
  source 1..101: mol_type = other RNA
gctaggacagccaggccagcaacagttgtagctccctgaaaccgttgctacaataaggccgtcgaaagatgtgccgcaacgctctgccttctggcatcgtt

SEQ ID NO: 1132 - RNA, 101 nt, synthetic construct
  source 1..101: mol_type = other RNA
gctccgatgaccacaactgctagggttgtagctccctgaaaccgttgctacaataaggccgtcgaaagatgtgccgcaacgctctgccttctggcatcgtt

SEQ ID NO: 1133 - RNA, 101 nt, synthetic construct
  source 1..101: mol_type = other RNA
tcgtgggcattgttgctggcctgggttgtagctccctgaaaccgttgctacaataaggccgtcgaaagatgtgccgcaacgctctgccttctggcatcgtt

SEQ ID NO: 1134 - RNA, 101 nt, synthetic construct
  source 1..101: mol_type = other RNA
gatgaccacaactgctaggacagcgttgtagctccctgaaaccgttgctacaataaggccgtcgaaagatgtgccgcaacgctctgccttctggcatcgtt

SEQ ID NO: 1135 - RNA, 101 nt, synthetic construct
  source 1..101: mol_type = other RNA
gtcctcgttcagggcgatgtaatcgttgtagctccctgaaaccgttgctacaataaggccgtcgaaagatgtgccgcaacgctctgccttctggcatcgtt

SEQ ID NO: 1136 - RNA, 101 nt, synthetic construct
  source 1..101: mol_type = other RNA
cgcagcctgagagtagctccctccgttgtagctccctgaaaccgttgctacaataaggccgtcgaaagatgtgccgcaacgctctgccttctggcatcgtt

SEQ ID NO: 1137 - RNA, 101 nt, synthetic construct
  source 1..101: mol_type = other RNA
ggtcagtgtgatctccgcagggtagttgtagctccctgaaaccgttgctacaataaggccgtcgaaagatgtgccgcaacgctctgccttctggcatcgtt

SEQ ID NO: 1138 - RNA, 101 nt, synthetic construct
  source 1..101: mol_type = other RNA
gtcagtgtgatctccgcagggtaggttgtagctccctgaaaccgttgctacaataaggccgtcgaaagatgtgccgcaacgctctgccttctggcatcgtt

SEQ ID NO: 1139 - RNA, 101 nt, synthetic construct
  source 1..101: mol_type = other RNA
tacatcgccctgaacgaggacctggttgtagctccctgaaaccgttgctacaataaggccgtcgaaagatgtgccgcaacgctctgccttctggcatcgtt

SEQ ID NO: 1140 - RNA, 101 nt, synthetic construct
  source 1..101: mol_type = other RNA
ggctcccactccatgaggtatttcgttgtagctccctgaaaccgttgctacaataaggccgtcgaaagatgtgccgcaacgctctgccttctggcatcgtt

SEQ ID NO: 1141 - RNA, 101 nt, synthetic construct
  source 1..101: mol_type = other RNA
tcttctccagaaggcaccaccacagttgtagctccctgaaaccgttgctacaataaggccgtcgaaagatgtgccgcaacgctctgccttctggcatcgtt

SEQ ID NO: 1142 - RNA, 101 nt, synthetic construct
  source 1..101: mol_type = other RNA
agcatgaggggctgccgaagccccgttgtagctccctgaaaccgttgctacaataaggccgtcgaaagatgtgccgcaacgctctgccttctggcatcgtt

SEQ ID NO: 1143 - RNA, 101 nt, synthetic construct
  source 1..101: mol_type = other RNA
agaccagaccagcaggagatagaagttgtagctccctgaaaccgttgctacaataaggccgtcgaaagatgtgccgcaacgctctgccttctggcatcgtt

SEQ ID NO: 1144 - RNA, 101 nt, synthetic construct
  source 1..101: mol_type = other RNA
aaggttctatctcctgctggtctggttgtagctccctgaaaccgttgctacaataaggccgtcgaaagatgtgccgcaacgctctgccttctggcatcgtt

SEQ ID NO: 1145 - RNA, 101 nt, synthetic construct
  source 1..101: mol_type = other RNA
gtggagaccagaccagcaggagatgttgtagctccctgaaaccgttgctacaataaggccgtcgaaagatgtgccgcaacgctctgccttctggcatcgtt

SEQ ID NO: 1146 - RNA, 101 nt, synthetic construct
  source 1..101: mol_type = other RNA
gcaaggattacatcgccctgaacggttgtagctccctgaaaccgttgctacaataaggccgtcgaaagatgtgccgcaacgctctgccttctggcatcgtt

SEQ ID NO: 1147 - RNA, 101 nt, synthetic construct
  source 1..101: mol_type = other RNA
accatgaggccaccctgaggtgctgttgtagctccctgaaaccgttgctacaataaggccgtcgaaagatgtgccgcaacgctctgccttctggcatcgtt

SEQ ID NO: 1148 - RNA, 101 nt, synthetic construct
  source 1..101: mol_type = other RNA
gaccatgaggccaccctgaggtgcgttgtagctccctgaaaccgttgctacaataaggccgtcgaaagatgtgccgcaacgctctgccttctggcatcgtt

SEQ ID NO: 1149 - RNA, 101 nt, synthetic construct
  source 1..101: mol_type = other RNA
accaccccatctctgaccatgagggttgtagctccctgaaaccgttgctacaataaggccgtcgaaagatgtgccgcaacgctctgccttctggcatcgtt

SEQ ID NO: 1150 - RNA, 101 nt, synthetic construct
  source 1..101: mol_type = other RNA
caccaccccatctctgaccatgaggttgtagctccctgaaaccgttgctacaataaggccgtcgaaagatgtgccgcaacgctctgccttctggcatcgtt

SEQ ID NO: 1151 - RNA, 101 nt, synthetic construct
  source 1..101: mol_type = other RNA
atgcccgcggaggaggcgcccgtcgttgtagctccctgaaaccgttgctacaataaggccgtcgaaagatgtgccgcaacgctctgccttctggcatcgtt

SEQ ID NO: 1152 - RNA, 101 nt, synthetic construct
  source 1..101: mol_type = other RNA
gaggcgcccgtccggccccacgtcgttgtagctccctgaaaccgttgctacaataaggccgtcgaaagatgtgccgcaacgctctgccttctggcatcgtt

SEQ ID NO: 1153 - RNA, 101 nt, synthetic construct
  source 1..101: mol_type = other RNA
gctgcgacgtggggccggacgggcgttgtagctccctgaaaccgttgctacaataaggccgtcgaaagatgtgccgcaacgctctgccttctggcatcgtt

SEQ ID NO: 1154 - RNA, 101 nt, synthetic construct
  source 1..101: mol_type = other RNA
gcgacgtggggccggacgggcgccgttgtagctccctgaaaccgttgctacaataaggccgtcgaaagatgtgccgcaacgctctgccttctggcatcgtt

SEQ ID NO: 1155 - RNA, 101 nt, synthetic construct
  source 1..101: mol_type = other RNA
cgtgaggttcgacagcgacgccgcgttgtagctccctgaaaccgttgctacaataaggccgtcgaaagatgtgccgcaacgctctgccttctggcatcgtt

SEQ ID NO: 1156 - RNA, 101 nt, synthetic construct
  source 1..101: mol_type = other RNA
tccttttccacctgtgggaagaaagttgtagctccctgaaaccgttgctacaataaggccgtcgaaagatgtgccgcaacgctctgccttctggcatcgtt

SEQ ID NO: 1157 - RNA, 101 nt, synthetic construct
  source 1..101: mol_type = other RNA
cagagcgaggccggtgagtgacccgttgtagctccctgaaaccgttgctacaataaggccgtcgaaagatgtgccgcaacgctctgccttctggcatcgtt

SEQ ID NO: 1158 - RNA, 101 nt, synthetic construct
  source 1..101: mol_type = other RNA
ggtgtagaaatacctcatggagtggttgtagctccctgaaaccgttgctacaataaggccgtcgaaagatgtgccgcaacgctctgccttctggcatcgtt

SEQ ID NO: 1159 - RNA, 101 nt, synthetic construct
  source 1..101: mol_type = other RNA
agaccctggccccggccccgcggtgttgtagctccctgaaaccgttgctacaataaggccgtcgaaagatgtgccgcaacgctctgccttctggcatcgtt

SEQ ID NO: 1160 - RNA, 101 nt, synthetic construct
  source 1..101: mol_type = other RNA
gagaccctggccccggccccgcgggttgtagctccctgaaaccgttgctacaataaggccgtcgaaagatgtgccgcaacgctctgccttctggcatcgtt

SEQ ID NO: 1161 - RNA, 101 nt, synthetic construct
  source 1..101: mol_type = other RNA
ctcaccggcctcgctctggttgtagttgtagctccctgaaaccgttgctacaataaggccgtcgaaagatgtgccgcaacgctctgccttctggcatcgtt

SEQ ID NO: 1162 - RNA, 101 nt, synthetic construct
  source 1..101: mol_type = other RNA
ctgcgcggctactacaaccagagcgttgtagctccctgaaaccgttgctacaataaggccgtcgaaagatgtgccgcaacgctctgccttctggcatcgtt

SEQ ID NO: 1163 - RNA, 101 nt, synthetic construct
  source 1..101: mol_type = other RNA
caaactcaggacactgagcttgtggttgtagctccctgaaaccgttgctacaataaggccgtcgaaagatgtgccgcaacgctctgccttctggcatcgtt

SEQ ID NO: 1164 - RNA, 101 nt, synthetic construct
  source 1..101: mol_type = other RNA
tcaggacactgagcttgtggagacgttgtagctccctgaaaccgttgctacaataaggccgtcgaaagatgtgccgcaacgctctgccttctggcatcgtt

SEQ ID NO: 1165 - RNA, 101 nt, synthetic construct
  source 1..101: mol_type = other RNA
tctgggaaaggaggggaagatgaggttgtagctccctgaaaccgttgctacaataaggccgtcgaaagatgtgccgcaacgctctgccttctggcatcgtt

SEQ ID NO: 1166 - RNA, 101 nt, synthetic construct
  source 1..101: mol_type = other RNA
ctctgggaaaggaggggaagatgagttgtagctccctgaaaccgttgctacaataaggccgtcgaaagatgtgccgcaacgctctgccttctggcatcgtt

SEQ ID NO: 1167 - RNA, 101 nt, synthetic construct
  source 1..101: mol_type = other RNA
acccagttcgtgaggttcgacagcgttgtagctccctgaaaccgttgctacaataaggccgtcgaaagatgtgccgcaacgctctgccttctggcatcgtt

SEQ ID NO: 1168 - RNA, 101 nt, synthetic construct
  source 1..101: mol_type = other RNA
cgctgcctggagtagaacaaaaacgttgtagctccctgaaaccgttgctacaataaggccgtcgaaagatgtgccgcaacgctctgccttctggcatcgtt

SEQ ID NO: 1169 - RNA, 101 nt, synthetic construct
  source 1..101: mol_type = other RNA
ctggagggtgtgagaccctggcccgttgtagctccctgaaaccgttgctacaataaggccgtcgaaagatgtgccgcaacgctctgccttctggcatcgtt

SEQ ID NO: 1170 - RNA, 101 nt, synthetic construct
  source 1..101: mol_type = other RNA
gcccaggtctcggtcagggccagggttgtagctccctgaaaccgttgctacaataaggccgtcgaaagatgtgccgcaacgctctgccttctggcatcgtt

SEQ ID NO: 1171 - RNA, 101 nt, synthetic construct
  source 1..101: mol_type = other RNA
ctgtgtgttccggtcccaatactcgttgtagctccctgaaaccgttgctacaataaggccgtcgaaagatgtgccgcaacgctctgccttctggcatcgtt

SEQ ID NO: 1172 - RNA, 101 nt, synthetic construct
  source 1..101: mol_type = other RNA
tctgtgtgttccggtcccaatactgttgtagctccctgaaaccgttgctacaataaggccgtcgaaagatgtgccgcaacgctctgccttctggcatcgtt

SEQ ID NO: 1173 - RNA, 101 nt, synthetic construct
  source 1..101: mol_type = other RNA
tgtgtgttccggtcccaatactccgttgtagctccctgaaaccgttgctacaataaggccgtcgaaagatgtgccgcaacgctctgccttctggcatcgtt

SEQ ID NO: 1174 - RNA, 101 nt, synthetic construct
  source 1..101: mol_type = other RNA
cgaaccgtcctcctgctgctctcggttgtagctccctgaaaccgttgctacaataaggccgtcgaaagatgtgccgcaacgctctgccttctggcatcgtt

SEQ ID NO: 1175 - RNA, 101 nt, synthetic construct
  source 1..101: mol_type = other RNA
tctggagggtgtgagaccctggccgttgtagctccctgaaaccgttgctacaataaggccgtcgaaagatgtgccgcaacgctctgccttctggcatcgtt

SEQ ID NO: 1176 - RNA, 101 nt, synthetic construct
  source 1..101: mol_type = other RNA
cccagagccgtcttcccagtccacgttgtagctccctgaaaccgttgctacaataaggccgtcgaaagatgtgccgcaacgctctgccttctggcatcgtt

SEQ ID NO: 1177 - RNA, 101 nt, synthetic construct
  source 1..101: mol_type = other RNA
tcccagagccgtcttcccagtccagttgtagctccctgaaaccgttgctacaataaggccgtcgaaagatgtgccgcaacgctctgccttctggcatcgtt

SEQ ID NO: 1178 - RNA, 101 nt, synthetic construct
  source 1..101: mol_type = other RNA
ccagagccgtcttcccagtccaccgttgtagctccctgaaaccgttgctacaataaggccgtcgaaagatgtgccgcaacgctctgccttctggcatcgtt

SEQ ID NO: 1179 - RNA, 101 nt, synthetic construct
  source 1..101: mol_type = other RNA
gtgttccggtcccaatactccggcgttgtagctccctgaaaccgttgctacaataaggccgtcgaaagatgtgccgcaacgctctgccttctggcatcgtt

SEQ ID NO: 1180 - RNA, 101 nt, synthetic construct
  source 1..101: mol_type = other RNA
tggagggtgtgagaccctggccccgttgtagctccctgaaaccgttgctacaataaggccgtcgaaagatgtgccgcaacgctctgccttctggcatcgtt

SEQ ID NO: 1181 - RNA, 101 nt, synthetic construct
  source 1..101: mol_type = other RNA
ccggcccctcctgctctatccacggttgtagctccctgaaaccgttgctacaataaggccgtcgaaagatgtgccgcaacgctctgccttctggcatcgtt

SEQ ID NO: 1182 - RNA, 101 nt, synthetic construct
  source 1..101: mol_type = other RNA
tcccacttgcgctgggtgatctgagttgtagctccctgaaaccgttgctacaataaggccgtcgaaagatgtgccgcaacgctctgccttctggcatcgtt

SEQ ID NO: 1183 - RNA, 101 nt, synthetic construct
  source 1..101: mol_type = other RNA
cacagactgaccgagagagcctgcgttgtagctccctgaaaccgttgctacaataaggccgtcgaaagatgtgccgcaacgctctgccttctggcatcgtt

SEQ ID NO: 1184 - RNA, 101 nt, synthetic construct
  source 1..101: mol_type = other RNA
tgctggtcatggcgccccgaaccggttgtagctccctgaaaccgttgctacaataaggccgtcgaaagatgtgccgcaacgctctgccttctggcatcgtt

SEQ ID NO: 1185 - RNA, 101 nt, synthetic construct
  source 1..101: mol_type = other RNA
cacatcagagccctgggcactgtcgttgtagctccctgaaaccgttgctacaataaggccgtcgaaagatgtgccgcaacgctctgccttctggcatcgtt

SEQ ID NO: 1186-1300 - skipped (115 entries)

SEQ ID NO: 1301 - RNA, 100 nt, synthetic construct
  source 1..100: mol_type = other RNA
tggagggcctgatgtgtgttgttttagagctagaaatagcaagttaaaataaggctagtccgttatcaacttgaaaaagtggcaccgagtcggtgctttt

SEQ ID NO: 1302 - RNA, 100 nt, synthetic construct
  source 1..100: mol_type = other RNA
gcctgatgtgtgttgggtgtgttttagagctagaaatagcaagttaaaataaggctagtccgttatcaacttgaaaaagtggcaccgagtcggtgctttt

SEQ ID NO: 1303 - RNA, 100 nt, synthetic construct
  source 1..100: mol_type = other RNA
cctgatgtgtgttgggtgttgttttagagctagaaatagcaagttaaaataaggctagtccgttatcaacttgaaaaagtggcaccgagtcggtgctttt

SEQ ID NO: 1304 - RNA, 100 nt, synthetic construct
  source 1..100: mol_type = other RNA
cccaacacccaacacacatcgttttagagctagaaatagcaagttaaaataaggctagtccgttatcaacttgaaaaagtggcaccgagtcggtgctttt

SEQ ID NO: 1305 - RNA, 100 nt, synthetic construct
  source 1..100: mol_type = other RNA
tcaggaaacatgaagaaagcgttttagagctagaaatagcaagttaaaataaggctagtccgttatcaacttgaaaaagtggcaccgagtcggtgctttt

SEQ ID NO: 1306 - RNA, 100 nt, synthetic construct
  source 1..100: mol_type = other RNA
aggcgcctgggcctctcccggttttagagctagaaatagcaagttaaaataaggctagtccgttatcaacttgaaaaagtggcaccgagtcggtgctttt

SEQ ID NO: 1307 - RNA, 100 nt, synthetic construct
  source 1..100: mol_type = other RNA
cgggctggcctcccacaagggttttagagctagaaatagcaagttaaaataaggctagtccgttatcaacttgaaaaagtggcaccgagtcggtgctttt

SEQ ID NO: 1308 - RNA, 100 nt, synthetic construct
  source 1..100: mol_type = other RNA
acggccatcctcggcgtctggttttagagctagaaatagcaagttaaaataaggctagtccgttatcaacttgaaaaagtggcaccgagtcggtgctttt

SEQ ID NO: 1309 - RNA, 100 nt, synthetic construct
  source 1..100: mol_type = other RNA
gacggccatcctcggcgtctgttttagagctagaaatagcaagttaaaataaggctagtccgttatcaacttgaaaaagtggcaccgagtcggtgctttt

SEQ ID NO: 1310 - RNA, 100 nt, synthetic construct
  source 1..100: mol_type = other RNA
gacgccgaggatggccgtcagttttagagctagaaatagcaagttaaaataaggctagtccgttatcaacttgaaaaagtggcaccgagtcggtgctttt

SEQ ID NO: 1311 - RNA, 100 nt, synthetic construct
  source 1..100: mol_type = other RNA
tgacggccatcctcggcgtcgttttagagctagaaatagcaagttaaaataaggctagtccgttatcaacttgaaaaagtggcaccgagtcggtgctttt

SEQ ID NO: 1312 - RNA, 100 nt, synthetic construct
  source 1..100: mol_type = other RNA
ggcgccatgacggccatcctgttttagagctagaaatagcaagttaaaataaggctagtccgttatcaacttgaaaaagtggcaccgagtcggtgctttt

SEQ ID NO: 1313 - RNA, 100 nt, synthetic construct; identical to SEQ ID NO: 998
  source 1..100: mol_type = other RNA

SEQ ID NO: 1314 - RNA, 100 nt, synthetic construct
  source 1..100: mol_type = other RNA
cgacgccgcgagccagaggagttttagagctagaaatagcaagttaaaataaggctagtccgttatcaacttgaaaaagtggcaccgagtcggtgctttt

SEQ ID NO: 1315 - RNA, 100 nt, synthetic construct
  source 1..100: mol_type = other RNA
cgagccagaggatggagccggttttagagctagaaatagcaagttaaaataaggctagtccgttatcaacttgaaaaagtggcaccgagtcggtgctttt

SEQ ID NO: 1316 - RNA, 100 nt, synthetic construct
  source 1..100: mol_type = other RNA
cggctccatcctctggctcggttttagagctagaaatagcaagttaaaataaggctagtccgttatcaacttgaaaaagtggcaccgagtcggtgctttt

SEQ ID NO: 1317 - RNA, 100 nt, synthetic construct
  source 1..100: mol_type = other RNA
gagccagaggatggagccgcgttttagagctagaaatagcaagttaaaataaggctagtccgttatcaacttgaaaaagtggcaccgagtcggtgctttt

SEQ ID NO: 1318 - RNA, 100 nt, synthetic construct
  source 1..100: mol_type = other RNA
gcgcccgcggctccatcctcgttttagagctagaaatagcaagttaaaataaggctagtccgttatcaacttgaaaaagtggcaccgagtcggtgctttt

SEQ ID NO: 1319 - RNA, 100 nt, synthetic construct
  source 1..100: mol_type = other RNA
gcccgtccgtgggggatgaggttttagagctagaaatagcaagttaaaataaggctagtccgttatcaacttgaaaaagtggcaccgagtcggtgctttt

SEQ ID NO: 1320 - RNA, 100 nt, synthetic construct
  source 1..100: mol_type = other RNA
tcatcccccacggacgggccgttttagagctagaaatagcaagttaaaataaggctagtccgttatcaacttgaaaaagtggcaccgagtcggtgctttt

SEQ ID NO: 1321 - RNA, 100 nt, synthetic construct
  source 1..100: mol_type = other RNA
atctcggacccggagactgtgttttagagctagaaatagcaagttaaaataaggctagtccgttatcaacttgaaaaagtggcaccgagtcggtgctttt

SEQ ID NO: 1322 - RNA, 100 nt, synthetic construct
  source 1..100: mol_type = other RNA
ggggtcccgcggcttcgggggttttagagctagaaatagcaagttaaaataaggctagtccgttatcaacttgaaaaagtggcaccgagtcggtgctttt

SEQ ID NO: 1323 - RNA, 100 nt, synthetic construct
  source 1..100: mol_type = other RNA
ctcggggtcccgcggcttcggttttagagctagaaatagcaagttaaaataaggctagtccgttatcaacttgaaaaagtggcaccgagtcggtgctttt

SEQ ID NO: 1324 - RNA, 100 nt, synthetic construct
  source 1..100: mol_type = other RNA
tctcggggtcccgcggcttcgttttagagctagaaatagcaagttaaaataaggctagtccgttatcaacttgaaaaagtggcaccgagtcggtgctttt

SEQ ID NO: 1325 - RNA, 100 nt, synthetic construct
  source 1..100: mol_type = other RNA
gtctcggggtcccgcggcttgttttagagctagaaatagcaagttaaaataaggctagtccgttatcaacttgaaaaagtggcaccgagtcggtgctttt

SEQ ID NO: 1326 - RNA, 100 nt, synthetic construct
  source 1..100: mol_type = other RNA
gcaagggtctcggggtcccggttttagagctagaaatagcaagttaaaataaggctagtccgttatcaacttgaaaaagtggcaccgagtcggtgctttt

SEQ ID NO: 1327 - RNA, 100 nt, synthetic construct
  source 1..100: mol_type = other RNA
ggaccccgagacccttgcccgttttagagctagaaatagcaagttaaaataaggctagtccgttatcaacttgaaaaagtggcaccgagtcggtgctttt

SEQ ID NO: 1328 - RNA, 100 nt, synthetic construct
  source 1..100: mol_type = other RNA
gaccccgagacccttgccccgttttagagctagaaatagcaagttaaaataaggctagtccgttatcaacttgaaaaagtggcaccgagtcggtgctttt

SEQ ID NO: 1329 - RNA, 100 nt, synthetic construct
  source 1..100: mol_type = other RNA
cgagacccttgccccgggaggttttagagctagaaatagcaagttaaaataaggctagtccgttatcaacttgaaaaagtggcaccgagtcggtgctttt

SEQ ID NO: 1330 - RNA, 100 nt, synthetic construct
  source 1..100: mol_type = other RNA
ctcccggggcaagggtctcggttttagagctagaaatagcaagttaaaataaggctagtccgttatcaacttgaaaaagtggcaccgagtcggtgctttt

SEQ ID NO: 1331 - RNA, 100 nt, synthetic construct
  source 1..100: mol_type = other RNA
tctcccggggcaagggtctcgttttagagctagaaatagcaagttaaaataaggctagtccgttatcaacttgaaaaagtggcaccgagtcggtgctttt

SEQ ID NO: 1332 - RNA, 100 nt, synthetic construct
  source 1..100: mol_type = other RNA
ctctcccggggcaagggtctgttttagagctagaaatagcaagttaaaataaggctagtccgttatcaacttgaaaaagtggcaccgagtcggtgctttt

SEQ ID NO: 1333 - RNA, 100 nt, synthetic construct
  source 1..100: mol_type = other RNA
ccttgccccgggagaggcccgttttagagctagaaatagcaagttaaaataaggctagtccgttatcaacttgaaaaagtggcaccgagtcggtgctttt

SEQ ID NO: 1334 - RNA, 100 nt, synthetic construct
  source 1..100: mol_type = other RNA
ctgggcctctcccggggcaagttttagagctagaaatagcaagttaaaataaggctagtccgttatcaacttgaaaaagtggcaccgagtcggtgctttt

SEQ ID NO: 1335 - RNA, 100 nt, synthetic construct
  source 1..100: mol_type = other RNA
cctgggcctctcccggggcagttttagagctagaaatagcaagttaaaataaggctagtccgttatcaacttgaaaaagtggcaccgagtcggtgctttt

SEQ ID NO: 1336 - RNA, 100 nt, synthetic construct
  source 1..100: mol_type = other RNA
tttaggccaaaaatccccccgttttagagctagaaatagcaagttaaaataaggctagtccgttatcaacttgaaaaagtggcaccgagtcggtgctttt

SEQ ID NO: 1337 - RNA, 100 nt, synthetic construct
  source 1..100: mol_type = other RNA
cgctgcagcgcacgggtaccgttttagagctagaaatagcaagttaaaataaggctagtccgttatcaacttgaaaaagtggcaccgagtcggtgctttt

SEQ ID NO: 1338 - RNA, 100 nt, synthetic construct
  source 1..100: mol_type = other RNA
gctgcagcgcacgggtaccagttttagagctagaaatagcaagttaaaataaggctagtccgttatcaacttgaaaaagtggcaccgagtcggtgctttt

SEQ ID NO: 1339 - RNA, 100 nt, synthetic construct
  source 1..100: mol_type = other RNA
ctgcagcgcacgggtaccaggttttagagctagaaatagcaagttaaaataaggctagtccgttatcaacttgaaaaagtggcaccgagtcggtgctttt

SEQ ID NO: 1340 - RNA, 100 nt, synthetic construct
  source 1..100: mol_type = other RNA
cgcacgggtaccaggggccagttttagagctagaaatagcaagttaaaataaggctagtccgttatcaacttgaaaaagtggcaccgagtcggtgctttt

SEQ ID NO: 1341 - RNA, 100 nt, synthetic construct
  source 1..100: mol_type = other RNA
gcacgggtaccaggggccacgttttagagctagaaatagcaagttaaaataaggctagtccgttatcaacttgaaaaagtggcaccgagtcggtgctttt

SEQ ID NO: 1342 - RNA, 100 nt, synthetic construct
  source 1..100: mol_type = other RNA
cacgggtaccaggggccacggttttagagctagaaatagcaagttaaaataaggctagtccgttatcaacttgaaaaagtggcaccgagtcggtgctttt

SEQ ID NO: 1343 - RNA, 100 nt, synthetic construct
  source 1..100: mol_type = other RNA
gggaggcgccccgtggccccgttttagagctagaaatagcaagttaaaataaggctagtccgttatcaacttgaaaaagtggcaccgagtcggtgctttt

SEQ ID NO: 1344 - RNA, 100 nt, synthetic construct
  source 1..100: mol_type = other RNA
gcgatcagggaggcgccccggttttagagctagaaatagcaagttaaaataaggctagtccgttatcaacttgaaaaagtggcaccgagtcggtgctttt

SEQ ID NO: 1345 - RNA, 100 nt, synthetic construct
  source 1..100: mol_type = other RNA
tccttgtgggaggccagcccgttttagagctagaaatagcaagttaaaataaggctagtccgttatcaacttgaaaaagtggcaccgagtcggtgctttt

SEQ ID NO: 1346 - RNA, 100 nt, synthetic construct
  source 1..100: mol_type = other RNA
ctccttgtgggaggccagccgttttagagctagaaatagcaagttaaaataaggctagtccgttatcaacttgaaaaagtggcaccgagtcggtgctttt

SEQ ID NO: 1347 - RNA, 100 nt, synthetic construct
  source 1..100: mol_type = other RNA
ggctggcctcccacaaggaggttttagagctagaaatagcaagttaaaataaggctagtccgttatcaacttgaaaaagtggcaccgagtcggtgctttt

SEQ ID NO: 1348 - RNA, 100 nt, synthetic construct
  source 1..100: mol_type = other RNA
ttgtctcccctccttgtggggttttagagctagaaatagcaagttaaaataaggctagtccgttatcaacttgaaaaagtggcaccgagtcggtgctttt

SEQ ID NO: 1349 - RNA, 100 nt, synthetic construct
  source 1..100: mol_type = other RNA
ccacaaggaggggagacaatgttttagagctagaaatagcaagttaaaataaggctagtccgttatcaacttgaaaaagtggcaccgagtcggtgctttt

SEQ ID NO: 1350 - RNA, 100 nt, synthetic construct
  source 1..100: mol_type = other RNA
cacaaggaggggagacaattgttttagagctagaaatagcaagttaaaataaggctagtccgttatcaacttgaaaaagtggcaccgagtcggtgctttt

SEQ ID NO: 1351 - RNA, 100 nt, synthetic construct
  source 1..100: mol_type = other RNA
caattgtctcccctccttgtgttttagagctagaaatagcaagttaaaataaggctagtccgttatcaacttgaaaaagtggcaccgagtcggtgctttt

SEQ ID NO: 1352 - RNA, 100 nt, synthetic construct
  source 1..100: mol_type = other RNA
ccaattgtctcccctccttggttttagagctagaaatagcaagttaaaataaggctagtccgttatcaacttgaaaaagtggcaccgagtcggtgctttt

SEQ ID NO: 1353 - RNA, 100 nt, synthetic construct
  source 1..100: mol_type = other RNA
atccctcgaatactgatgaggttttagagctagaaatagcaagttaaaataaggctagtccgttatcaacttgaaaaagtggcaccgagtcggtgctttt

SEQ ID NO: 1354 - RNA, 100 nt, synthetic construct
  source 1..100: mol_type = other RNA
aaccactcatcagtattcgagttttagagctagaaatagcaagttaaaataaggctagtccgttatcaacttgaaaaagtggcaccgagtcggtgctttt

SEQ ID NO: 1355 - RNA, 100 nt, synthetic construct
  source 1..100: mol_type = other RNA
gaaccactcatcagtattcggttttagagctagaaatagcaagttaaaataaggctagtccgttatcaacttgaaaaagtggcaccgagtcggtgctttt

SEQ ID NO: 1356 - RNA, 100 nt, synthetic construct
  source 1..100: mol_type = other RNA
gaggaaaagtcacgggcccagttttagagctagaaatagcaagttaaaataaggctagtccgttatcaacttgaaaaagtggcaccgagtcggtgctttt

SEQ ID NO: 1357 - RNA, 100 nt, synthetic construct
  source 1..100: mol_type = other RNA
ggcccgtgacttttcctctcgttttagagctagaaatagcaagttaaaataaggctagtccgttatcaacttgaaaaagtggcaccgagtcggtgctttt

SEQ ID NO: 1358 - RNA, 100 nt, synthetic construct
  source 1..100: mol_type = other RNA
tgcttcacactcaatgtgtggttttagagctagaaatagcaagttaaaataaggctagtccgttatcaacttgaaaaagtggcaccgagtcggtgctttt

SEQ ID NO: 1359 - RNA, 100 nt, synthetic construct
  source 1..100: mol_type = other RNA
gcttcacactcaatgtgtgtgttttagagctagaaatagcaagttaaaataaggctagtccgttatcaacttgaaaaagtggcaccgagtcggtgctttt

SEQ ID NO: 1360 - RNA, 100 nt, synthetic construct
  source 1..100: mol_type = other RNA
cttcacactcaatgtgtgtggttttagagctagaaatagcaagttaaaataaggctagtccgttatcaacttgaaaaagtggcaccgagtcggtgctttt

SEQ ID NO: 1361 - RNA, 100 nt, synthetic construct
  source 1..100: mol_type = other RNA
ttcacactcaatgtgtgtgggttttagagctagaaatagcaagttaaaataaggctagtccgttatcaacttgaaaaagtggcaccgagtcggtgctttt

SEQ ID NO: 1362 - RNA, 100 nt, synthetic construct
  source 1..100: mol_type = other RNA
ttgagaatggacaggacaccgttttagagctagaaatagcaagttaaaataaggctagtccgttatcaacttgaaaaagtggcaccgagtcggtgctttt

SEQ ID NO: 1363 - RNA, 100 nt, synthetic construct
  source 1..100: mol_type = other RNA
aggcattttgcatctgtcatgttttagagctagaaatagcaagttaaaataaggctagtccgttatcaacttgaaaaagtggcaccgagtcggtgctttt

SEQ ID NO: 1364 - RNA, 100 nt, synthetic construct
  source 1..100: mol_type = other RNA
caggcattttgcatctgtcagttttagagctagaaatagcaagttaaaataaggctagtccgttatcaacttgaaaaagtggcaccgagtcggtgctttt

SEQ ID NO: 1365 - RNA, 100 nt, synthetic construct
  source 1..100: mol_type = other RNA
aggggccctgaccctgctaagttttagagctagaaatagcaagttaaaataaggctagtccgttatcaacttgaaaaagtggcaccgagtcggtgctttt

SEQ ID NO: 1366 - RNA, 100 nt, synthetic construct
  source 1..100: mol_type = other RNA
tgggaaaagaggggaaggtggttttagagctagaaatagcaagttaaaataaggctagtccgttatcaacttgaaaaagtggcaccgagtcggtgctttt

SEQ ID NO: 1367 - RNA, 100 nt, synthetic construct
  source 1..100: mol_type = other RNA
tggaggaggaagagctcagggttttagagctagaaatagcaagttaaaataaggctagtccgttatcaacttgaaaaagtggcaccgagtcggtgctttt

SEQ ID NO: 1368 - RNA, 100 nt, synthetic construct
  source 1..100: mol_type = other RNA
tgagatttcttgtctcactggttttagagctagaaatagcaagttaaaataaggctagtccgttatcaacttgaaaaagtggcaccgagtcggtgctttt

SEQ ID NO: 1369 - RNA, 100 nt, synthetic construct
  source 1..100: mol_type = other RNA
gagatttcttgtctcactgagttttagagctagaaatagcaagttaaaataaggctagtccgttatcaacttgaaaaagtggcaccgagtcggtgctttt

SEQ ID NO: 1370 - RNA, 100 nt, synthetic construct
  source 1..100: mol_type = other RNA
taaagcacctgttaaaatgagttttagagctagaaatagcaagttaaaataaggctagtccgttatcaacttgaaaaagtggcaccgagtcggtgctttt

SEQ ID NO: 1371 - RNA, 100 nt, synthetic construct
  source 1..100: mol_type = other RNA
aatctgtccttcattttaacgttttagagctagaaatagcaagttaaaataaggctagtccgttatcaacttgaaaaagtggcaccgagtcggtgctttt

SEQ ID NO: 1372 - RNA, 100 nt, synthetic construct
  source 1..100: mol_type = other RNA
gtcacaggggaaggtccctggttttagagctagaaatagcaagttaaaataaggctagtccgttatcaacttgaaaaagtggcaccgagtcggtgctttt

SEQ ID NO: 1373 - RNA, 100 nt, synthetic construct
  source 1..100: mol_type = other RNA
aaacatgaagaaagcaggtggttttagagctagaaatagcaagttaaaataaggctagtccgttatcaacttgaaaaagtggcaccgagtcggtgctttt

SEQ ID NO: 1374 - RNA, 100 nt, synthetic construct
  source 1..100: mol_type = other RNA
tgtcctgtgagataccagaagttttagagctagaaatagcaagttaaaataaggctagtccgttatcaacttgaaaaagtggcaccgagtcggtgctttt

SEQ ID NO: 1375 - RNA, 100 nt, synthetic construct
  source 1..100: mol_type = other RNA
atgaaggaggctgatgcctggttttagagctagaaatagcaagttaaaataaggctagtccgttatcaacttgaaaaagtggcaccgagtcggtgctttt

SEQ ID NO: 1376 - RNA, 100 nt, synthetic construct
  source 1..100: mol_type = other RNA
aggctgatgcctgaggtcctgttttagagctagaaatagcaagttaaaataaggctagtccgttatcaacttgaaaaagtggcaccgagtcggtgctttt

SEQ ID NO: 1377 - RNA, 100 nt, synthetic construct
  source 1..100: mol_type = other RNA
ggctgatgcctgaggtccttgttttagagctagaaatagcaagttaaaataaggctagtccgttatcaacttgaaaaagtggcaccgagtcggtgctttt

SEQ ID NO: 1378 - RNA, 100 nt, synthetic construct
  source 1..100: mol_type = other RNA
cacaatatcccaaggacctcgttttagagctagaaatagcaagttaaaataaggctagtccgttatcaacttgaaaaagtggcaccgagtcggtgctttt

SEQ ID NO: 1379 - RNA, 100 nt, synthetic construct
  source 1..100: mol_type = other RNA
ggtccttgggatattgtgttgttttagagctagaaatagcaagttaaaataaggctagtccgttatcaacttgaaaaagtggcaccgagtcggtgctttt

SEQ ID NO: 1380 - RNA, 100 nt, synthetic construct
  source 1..100: mol_type = other RNA
gtccttgggatattgtgtttgttttagagctagaaatagcaagttaaaataaggctagtccgttatcaacttgaaaaagtggcaccgagtcggtgctttt

SEQ ID NO: 1381 - RNA, 100 nt, synthetic construct
  source 1..100: mol_type = other RNA
ctcccaaacacaatatcccagttttagagctagaaatagcaagttaaaataaggctagtccgttatcaacttgaaaaagtggcaccgagtcggtgctttt

SEQ ID NO: 1382 - RNA, 100 nt, synthetic construct
  source 1..100: mol_type = other RNA
tcctctagccacatcttctggttttagagctagaaatagcaagttaaaataaggctagtccgttatcaacttgaaaaagtggcaccgagtcggtgctttt

SEQ ID NO: 1383 - RNA, 100 nt, synthetic construct
  source 1..100: mol_type = other RNA
acagaagatgtggctagagggttttagagctagaaatagcaagttaaaataaggctagtccgttatcaacttgaaaaagtggcaccgagtcggtgctttt

SEQ ID NO: 1384 - RNA, 100 nt, synthetic construct
  source 1..100: mol_type = other RNA
cctctagccacatcttctgtgttttagagctagaaatagcaagttaaaataaggctagtccgttatcaacttgaaaaagtggcaccgagtcggtgctttt

SEQ ID NO: 1385 - RNA, 100 nt, synthetic construct
  source 1..100: mol_type = other RNA
cccacagaagatgtggctaggttttagagctagaaatagcaagttaaaataaggctagtccgttatcaacttgaaaaagtggcaccgagtcggtgctttt

SEQ ID NO: 1386 - RNA, 100 nt, synthetic construct
  source 1..100: mol_type = other RNA
gtcagatcccacagaagatggttttagagctagaaatagcaagttaaaataaggctagtccgttatcaacttgaaaaagtggcaccgagtcggtgctttt

SEQ ID NO: 1387 - RNA, 100 nt, synthetic construct
  source 1..100: mol_type = other RNA
atcttctgtgggatctgaccgttttagagctagaaatagcaagttaaaataaggctagtccgttatcaacttgaaaaagtggcaccgagtcggtgctttt

SEQ ID NO: 1388 - RNA, 100 nt, synthetic construct
  source 1..100: mol_type = other RNA
cccaggcagtgacagtgcccgttttagagctagaaatagcaagttaaaataaggctagtccgttatcaacttgaaaaagtggcaccgagtcggtgctttt

SEQ ID NO: 1389 - RNA, 100 nt, synthetic construct
  source 1..100: mol_type = other RNA
ctgggcactgtcactgcctggttttagagctagaaatagcaagttaaaataaggctagtccgttatcaacttgaaaaagtggcaccgagtcggtgctttt

SEQ ID NO: 1390 - RNA, 100 nt, synthetic construct
  source 1..100: mol_type = other RNA
cctgggcactgtcactgcctgttttagagctagaaatagcaagttaaaataaggctagtccgttatcaacttgaaaaagtggcaccgagtcggtgctttt

SEQ ID NO: 1391 - RNA, 100 nt, synthetic construct
  source 1..100: mol_type = other RNA
ccctgggcactgtcactgccgttttagagctagaaatagcaagttaaaataaggctagtccgttatcaacttgaaaaagtggcaccgagtcggtgctttt

SEQ ID NO: 1392 - RNA, 100 nt, synthetic construct
  source 1..100: mol_type = other RNA
ttgggtgttgggcggaacaggttttagagctagaaatagcaagttaaaataaggctagtccgttatcaacttgaaaaagtggcaccgagtcggtgctttt

SEQ ID NO: 1393 - RNA, 100 nt, synthetic construct
  source 1..100: mol_type = other RNA
tggatgtattgagcatgcgagttttagagctagaaatagcaagttaaaataaggctagtccgttatcaacttgaaaaagtggcaccgagtcggtgctttt

SEQ ID NO: 1394 - RNA, 100 nt, synthetic construct
  source 1..100: mol_type = other RNA
ggatgtattgagcatgcgatgttttagagctagaaatagcaagttaaaataaggctagtccgttatcaacttgaaaaagtggcaccgagtcggtgctttt

SEQ ID NO: 1395 - RNA, 100 nt, synthetic construct
  source 1..100: mol_type = other RNA
aacatgaagaaagcaggtgtgttttagagctagaaatagcaagttaaaataaggctagtccgttatcaacttgaaaaagtggcaccgagtcggtgctttt

SEQ ID NO: 1396 - RNA, 100 nt, synthetic construct
  source 1..100: mol_type = other RNA
tagcccacggcgatgaagcggttttagagctagaaatagcaagttaaaataaggctagtccgttatcaacttgaaaaagtggcaccgagtcggtgctttt

SEQ ID NO: 1397 - RNA, 100 nt, synthetic construct
  source 1..100: mol_type = other RNA
gtagcccacggcgatgaagcgttttagagctagaaatagcaagttaaaataaggctagtccgttatcaacttgaaaaagtggcaccgagtcggtgctttt

SEQ ID NO: 1398 - RNA, 100 nt, synthetic construct
  source 1..100: mol_type = other RNA
cgtagcccacggcgatgaaggttttagagctagaaatagcaagttaaaataaggctagtccgttatcaacttgaaaaagtggcaccgagtcggtgctttt

SEQ ID NO: 1399 - RNA, 100 nt, synthetic construct
  source 1..100: mol_type = other RNA
cttcatcgccgtgggctacggttttagagctagaaatagcaagttaaaataaggctagtccgttatcaacttgaaaaagtggcaccgagtcggtgctttt

SEQ ID NO: 1400 - RNA, 100 nt, synthetic construct
  source 1..100: mol_type = other RNA
cgtgtcgtccacgtagcccagttttagagctagaaatagcaagttaaaataaggctagtccgttatcaacttgaaaaagtggcaccgagtcggtgctttt

SEQ ID NO: 1401 - RNA, 100 nt, synthetic construct
  source 1..100: mol_type = other RNA
tggacgacacgcagttcgtggttttagagctagaaatagcaagttaaaataaggctagtccgttatcaacttgaaaaagtggcaccgagtcggtgctttt

SEQ ID NO: 1402 - RNA, 100 nt, synthetic construct
  source 1..100: mol_type = other RNA
ggatggagccgcgggcgccggttttagagctagaaatagcaagttaaaataaggctagtccgttatcaacttgaaaaagtggcaccgagtcggtgctttt

SEQ ID NO: 1403 - RNA, 100 nt, synthetic construct
  source 1..100: mol_type = other RNA
gcgggcgccgtggatagagcgttttagagctagaaatagcaagttaaaataaggctagtccgttatcaacttgaaaaagtggcaccgagtcggtgctttt

SEQ ID NO: 1404 - RNA, 100 nt, synthetic construct
  source 1..100: mol_type = other RNA
tgctctatccacggcgcccggttttagagctagaaatagcaagttaaaataaggctagtccgttatcaacttgaaaaagtggcaccgagtcggtgctttt

SEQ ID NO: 1405 - RNA, 100 nt, synthetic construct
  source 1..100: mol_type = other RNA
ggcgccgtggatagagcagggttttagagctagaaatagcaagttaaaataaggctagtccgttatcaacttgaaaaagtggcaccgagtcggtgctttt

SEQ ID NO: 1406 - RNA, 100 nt, synthetic construct
  source 1..100: mol_type = other RNA
gcgccgtggatagagcaggagttttagagctagaaatagcaagttaaaataaggctagtccgttatcaacttgaaaaagtggcaccgagtcggtgctttt

SEQ ID NO: 1407 - RNA, 100 nt, synthetic construct
  source 1..100: mol_type = other RNA
cgccgtggatagagcaggaggttttagagctagaaatagcaagttaaaataaggctagtccgttatcaacttgaaaaagtggcaccgagtcggtgctttt

SEQ ID NO: 1408 - RNA, 100 nt, synthetic construct
  source 1..100: mol_type = other RNA
gtggatagagcaggaggggcgttttagagctagaaatagcaagttaaaataaggctagtccgttatcaacttgaaaaagtggcaccgagtcggtgctttt

SEQ ID NO: 1409 - RNA, 100 nt, synthetic construct
  source 1..100: mol_type = other RNA
ggcccctcctgctctatccagttttagagctagaaatagcaagttaaaataaggctagtccgttatcaacttgaaaaagtggcaccgagtcggtgctttt

SEQ ID NO: 1410 - RNA, 100 nt, synthetic construct
  source 1..100: mol_type = other RNA
agcaggaggggccggagtatgttttagagctagaaatagcaagttaaaataaggctagtccgttatcaacttgaaaaagtggcaccgagtcggtgctttt

SEQ ID NO: 1411 - RNA, 100 nt, synthetic construct
  source 1..100: mol_type = other RNA
gcaggaggggccggagtattgttttagagctagaaatagcaagttaaaataaggctagtccgttatcaacttgaaaaagtggcaccgagtcggtgctttt

SEQ ID NO: 1412 - RNA, 100 nt, synthetic construct
  source 1..100: mol_type = other RNA
ggagtggctccgcagataccgttttagagctagaaatagcaagttaaaataaggctagtccgttatcaacttgaaaaagtggcaccgagtcggtgctttt

SEQ ID NO: 1413 - RNA, 100 nt, synthetic construct
  source 1..100: mol_type = other RNA
ctccgcagatacctggagaagttttagagctagaaatagcaagttaaaataaggctagtccgttatcaacttgaaaaagtggcaccgagtcggtgctttt

SEQ ID NO: 1414 - RNA, 100 nt, synthetic construct
  source 1..100: mol_type = other RNA
tccgcagatacctggagaacgttttagagctagaaatagcaagttaaaataaggctagtccgttatcaacttgaaaaagtggcaccgagtcggtgctttt

SEQ ID NO: 1415 - RNA, 100 nt, synthetic construct
  source 1..100: mol_type = other RNA
cagatacctggagaacgggagttttagagctagaaatagcaagttaaaataaggctagtccgttatcaacttgaaaaagtggcaccgagtcggtgctttt

SEQ ID NO: 1416 - RNA, 100 nt, synthetic construct
  source 1..100: mol_type = other RNA
tcccgttctccaggtatctggttttagagctagaaatagcaagttaaaataaggctagtccgttatcaacttgaaaaagtggcaccgagtcggtgctttt

SEQ ID NO: 1417 - RNA, 100 nt, synthetic construct
  source 1..100: mol_type = other RNA
gcgtctccttcccgttctccgttttagagctagaaatagcaagttaaaataaggctagtccgttatcaacttgaaaaagtggcaccgagtcggtgctttt

SEQ ID NO: 1418 - RNA, 100 nt, synthetic construct
  source 1..100: mol_type = other RNA
gaaggagacgctgcagcgcagttttagagctagaaatagcaagttaaaataaggctagtccgttatcaacttgaaaaagtggcaccgagtcggtgctttt

SEQ ID NO: 1419 - RNA, 100 nt, synthetic construct
  source 1..100: mol_type = other RNA
aaggagacgctgcagcgcacgttttagagctagaaatagcaagttaaaataaggctagtccgttatcaacttgaaaaagtggcaccgagtcggtgctttt

SEQ ID NO: 1420 - RNA, 100 nt, synthetic construct
  source 1..100: mol_type = other RNA
agatctacaggcgatcaggggttttagagctagaaatagcaagttaaaataaggctagtccgttatcaacttgaaaaagtggcaccgagtcggtgctttt

SEQ ID NO: 1421 - RNA, 100 nt, synthetic construct
  source 1..100: mol_type = other RNA
tgatcgcctgtagatctcccgttttagagctagaaatagcaagttaaaataaggctagtccgttatcaacttgaaaaagtggcaccgagtcggtgctttt

SEQ ID NO: 1422 - RNA, 100 nt, synthetic construct
  source 1..100: mol_type = other RNA
gggagatctacaggcgatcagttttagagctagaaatagcaagttaaaataaggctagtccgttatcaacttgaaaaagtggcaccgagtcggtgctttt

SEQ ID NO: 1423 - RNA, 100 nt, synthetic construct
  source 1..100: mol_type = other RNA
cgggagatctacaggcgatcgttttagagctagaaatagcaagttaaaataaggctagtccgttatcaacttgaaaaagtggcaccgagtcggtgctttt

SEQ ID NO: 1424 - RNA, 100 nt, synthetic construct
  source 1..100: mol_type = other RNA
cgcctgtagatctcccgggcgttttagagctagaaatagcaagttaaaataaggctagtccgttatcaacttgaaaaagtggcaccgagtcggtgctttt

SEQ ID NO: 1425 - RNA, 100 nt, synthetic construct
  source 1..100: mol_type = other RNA
ggccagcccgggagatctacgttttagagctagaaatagcaagttaaaataaggctagtccgttatcaacttgaaaaagtggcaccgagtcggtgctttt

SEQ ID NO: 1426 - RNA, 100 nt, synthetic construct
  source 1..100: mol_type = other RNA
tcccgggctggcctcccacagttttagagctagaaatagcaagttaaaataaggctagtccgttatcaacttgaaaaagtggcaccgagtcggtgctttt

SEQ ID NO: 1427 - RNA, 100 nt, synthetic construct
  source 1..100: mol_type = other RNA
gggctggcctcccacaaggagttttagagctagaaatagcaagttaaaataaggctagtccgttatcaacttgaaaaagtggcaccgagtcggtgctttt

SEQ ID NO: 1428 - RNA, 100 nt, synthetic construct
  source 1..100: mol_type = other RNA
ctgatcgcctgtagatctccgttttagagctagaaatagcaagttaaaataaggctagtccgttatcaacttgaaaaagtggcaccgagtcggtgctttt

SEQ ID NO: 1429-1482 - skipped (54 entries)

SEQ ID NO: 1483 - RNA, 100 nt, synthetic construct
  source 1..100: mol_type = other RNA
acgacactgattggcttctcgttttagagctagaaatagcaagttaaaataaggctagtccgttatcaacttgaaaaagtggcaccgagtcggtgctttt

SEQ ID NO: 1484 - RNA, 100 nt, synthetic construct
  source 1..100: mol_type = other RNA
acccctcatcccccacggacgttttagagctagaaatagcaagttaaaataaggctagtccgttatcaacttgaaaaagtggcaccgagtcggtgctttt

SEQ ID NO: 1485 - RNA, 100 nt, synthetic construct
  source 1..100: mol_type = other RNA
ggcccgtccgtgggggatgagttttagagctagaaatagcaagttaaaataaggctagtccgttatcaacttgaaaaagtggcaccgagtcggtgctttt

SEQ ID NO: 1486 - RNA, 100 nt, synthetic construct
  source 1..100: mol_type = other RNA
gccaggtcgcccacagtctcgttttagagctagaaatagcaagttaaaataaggctagtccgttatcaacttgaaaaagtggcaccgagtcggtgctttt

SEQ ID NO: 1487 - RNA, 100 nt, synthetic construct
  source 1..100: mol_type = other RNA
gtttaggccaaaaatcccccgttttagagctagaaatagcaagttaaaataaggctagtccgttatcaacttgaaaaagtggcaccgagtcggtgctttt

SEQ ID NO: 1488 - RNA, 100 nt, synthetic construct
  source 1..100: mol_type = other RNA
ggccaaaaatccccccgggtgttttagagctagaaatagcaagttaaaataaggctagtccgttatcaacttgaaaaagtggcaccgagtcggtgctttt

SEQ ID NO: 1489 - RNA, 100 nt, synthetic construct
  source 1..100: mol_type = other RNA
gaccaacccggggggattttgttttagagctagaaatagcaagttaaaataaggctagtccgttatcaacttgaaaaagtggcaccgagtcggtgctttt

SEQ ID NO: 1490 - RNA, 100 nt, synthetic construct
  source 1..100: mol_type = other RNA
cacgggcccaaggctgctgcgttttagagctagaaatagcaagttaaaataaggctagtccgttatcaacttgaaaaagtggcaccgagtcggtgctttt

SEQ ID NO: 1491 - RNA, 100 nt, synthetic construct
  source 1..100: mol_type = other RNA
accctcatgctgcacatggcgttttagagctagaaatagcaagttaaaataaggctagtccgttatcaacttgaaaaagtggcaccgagtcggtgctttt

SEQ ID NO: 1492 - RNA, 100 nt, synthetic construct
  source 1..100: mol_type = other RNA
cctctaggaccttaaggcccgttttagagctagaaatagcaagttaaaataaggctagtccgttatcaacttgaaaaagtggcaccgagtcggtgctttt

SEQ ID NO: 1493 - RNA, 100 nt, synthetic construct
  source 1..100: mol_type = other RNA
gctcctttctggtatctcacgttttagagctagaaatagcaagttaaaataaggctagtccgttatcaacttgaaaaagtggcaccgagtcggtgctttt

SEQ ID NO: 1494 - RNA, 100 nt, synthetic construct
  source 1..100: mol_type = other RNA
gctatggggtttctttgcatgttttagagctagaaatagcaagttaaaataaggctagtccgttatcaacttgaaaaagtggcaccgagtcggtgctttt

SEQ ID NO: 1495 - RNA, 100 nt, synthetic construct
  source 1..100: mol_type = other RNA
gcctttgcagaaacaaagtcgttttagagctagaaatagcaagttaaaataaggctagtccgttatcaacttgaaaaagtggcaccgagtcggtgctttt

SEQ ID NO: 1496 - RNA, 100 nt, synthetic construct
  source 1..100: mol_type = other RNA
tggaccaaccgccctcctgagttttagagctagaaatagcaagttaaaataaggctagtccgttatcaacttgaaaaagtggcaccgagtcggtgctttt

SEQ ID NO: 1497 - RNA, 100 nt, synthetic construct
  source 1..100: mol_type = other RNA
agcctctctgacctttagcagttttagagctagaaatagcaagttaaaataaggctagtccgttatcaacttgaaaaagtggcaccgagtcggtgctttt

SEQ ID NO: 1498 - RNA, 100 nt, synthetic construct
  source 1..100: mol_type = other RNA
cgccctcctgaaggtcctcagttttagagctagaaatagcaagttaaaataaggctagtccgttatcaacttgaaaaagtggcaccgagtcggtgctttt

SEQ ID NO: 1499 - skipped

SEQ ID NO: 1500 - RNA, 100 nt, synthetic construct
  source 1..100: mol_type = other RNA
ccgccctcctgaaggtcctcgttttagagctagaaatagcaagttaaaataaggctagtccgttatcaacttgaaaaagtggcaccgagtcggtgctttt

SEQ ID NO: 1501 - RNA, 100 nt, synthetic construct
  source 1..100: mol_type = other RNA
tggttccctttgacacacacgttttagagctagaaatagcaagttaaaataaggctagtccgttatcaacttgaaaaagtggcaccgagtcggtgctttt

SEQ ID NO: 1502 - RNA, 100 nt, synthetic construct
  source 1..100: mol_type = other RNA
gaccctgctaaaggtcagaggttttagagctagaaatagcaagttaaaataaggctagtccgttatcaacttgaaaaagtggcaccgagtcggtgctttt

SEQ ID NO: 1503 - RNA, 100 nt, synthetic construct
  source 1..100: mol_type = other RNA
aggaccttcaggagggcggtgttttagagctagaaatagcaagttaaaataaggctagtccgttatcaacttgaaaaagtggcaccgagtcggtgctttt

SEQ ID NO: 1504 - RNA, 100 nt, synthetic construct
  source 1..100: mol_type = other RNA
gcacacttctacctgggtctgttttagagctagaaatagcaagttaaaataaggctagtccgttatcaacttgaaaaagtggcaccgagtcggtgctttt

SEQ ID NO: 1505 - RNA, 100 nt, synthetic construct
  source 1..100: mol_type = other RNA
gagcctctctgacctttagcgttttagagctagaaatagcaagttaaaataaggctagtccgttatcaacttgaaaaagtggcaccgagtcggtgctttt

SEQ ID NO: 1506 - RNA, 100 nt, synthetic construct
  source 1..100: mol_type = other RNA
acactcctccagcacacatggttttagagctagaaatagcaagttaaaataaggctagtccgttatcaacttgaaaaagtggcaccgagtcggtgctttt

SEQ ID NO: 1507 - RNA, 100 nt, synthetic construct
  source 1..100: mol_type = other RNA
ctctgacctttagcagggtcgttttagagctagaaatagcaagttaaaataaggctagtccgttatcaacttgaaaaagtggcaccgagtcggtgctttt

SEQ ID NO: 1508 - RNA, 100 nt, synthetic construct
  source 1..100: mol_type = other RNA
caagatagccacatgtgtgcgttttagagctagaaatagcaagttaaaataaggctagtccgttatcaacttgaaaaagtggcaccgagtcggtgctttt

SEQ ID NO: 1509 - RNA, 100 nt, synthetic construct
  source 1..100: mol_type = other RNA
tctgacctttagcagggtcagttttagagctagaaatagcaagttaaaataaggctagtccgttatcaacttgaaaaagtggcaccgagtcggtgctttt

SEQ ID NO: 1510 - RNA, 100 nt, synthetic construct
  source 1..100: mol_type = other RNA
tgtaaaggtgagagcctggagttttagagctagaaatagcaagttaaaataaggctagtccgttatcaacttgaaaaagtggcaccgagtcggtgctttt

SEQ ID NO: 1511 - RNA, 100 nt, synthetic construct
  source 1..100: mol_type = other RNA
gaaggtccctgaggaccttcgttttagagctagaaatagcaagttaaaataaggctagtccgttatcaacttgaaaaagtggcaccgagtcggtgctttt

SEQ ID NO: 1512 - RNA, 101 nt, synthetic construct
  source 1..101: mol_type = other RNA
cctgggtctggtcctccccatcccgttgtagctccctgaaaccgttgctacaataaggccgtcgaaagatgtgccgcaacgctctgccttctggcatcgtt

SEQ ID NO: 1513 - RNA, 101 nt, synthetic construct
  source 1..101: mol_type = other RNA
gtggagaccaggcctgcaggggatgttgtagctccctgaaaccgttgctacaataaggccgtcgaaagatgtgccgcaacgctctgccttctggcatcgtt

SEQ ID NO: 1514 - RNA, 101 nt, synthetic construct
  source 1..101: mol_type = other RNA
ccgtgtcctgggtctggtcctcccgttgtagctccctgaaaccgttgctacaataaggccgtcgaaagatgtgccgcaacgctctgccttctggcatcgtt

SEQ ID NO: 1515 - RNA, 101 nt, synthetic construct
  source 1..101: mol_type = other RNA
tccgtgtcctgggtctggtcctccgttgtagctccctgaaaccgttgctacaataaggccgtcgaaagatgtgccgcaacgctctgccttctggcatcgtt

SEQ ID NO: 1516 - RNA, 101 nt, synthetic construct
  source 1..101: mol_type = other RNA
cacatggcaggtgtatctctgctcgttgtagctccctgaaaccgttgctacaataaggccgtcgaaagatgtgccgcaacgctctgccttctggcatcgtt

SEQ ID NO: 1517 - RNA, 101 nt, synthetic construct
  source 1..101: mol_type = other RNA
tgctgcacatggcaggtgtatctcgttgtagctccctgaaaccgttgctacaataaggccgtcgaaagatgtgccgcaacgctctgccttctggcatcgtt

SEQ ID NO: 1518 - RNA, 101 nt, synthetic construct
  source 1..101: mol_type = other RNA
ccgcacgaactgcgtgtcgtccacgttgtagctccctgaaaccgttgctacaataaggccgtcgaaagatgtgccgcaacgctctgccttctggcatcgtt

SEQ ID NO: 1519 - RNA, 101 nt, synthetic construct
  source 1..101: mol_type = other RNA
cgcacgaactgcgtgtcgtccacggttgtagctccctgaaaccgttgctacaataaggccgtcgaaagatgtgccgcaacgctctgccttctggcatcgtt

SEQ ID NO: 1520 - RNA, 101 nt, synthetic construct
  source 1..101: mol_type = other RNA
gtgcgctgcagcgtctccttcccggttgtagctccctgaaaccgttgctacaataaggccgtcgaaagatgtgccgcaacgctctgccttctggcatcgtt

SEQ ID NO: 1521 - RNA, 101 nt, synthetic construct
  source 1..101: mol_type = other RNA
ccgaggatggccgtcatggcgcccgttgtagctccctgaaaccgttgctacaataaggccgtcgaaagatgtgccgcaacgctctgccttctggcatcgtt

SEQ ID NO: 1522 - RNA, 101 nt, synthetic construct
  source 1..101: mol_type = other RNA
cgaggatggccgtcatggcgccccgttgtagctccctgaaaccgttgctacaataaggccgtcgaaagatgtgccgcaacgctctgccttctggcatcgtt

SEQ ID NO: 1523 - RNA, 101 nt, synthetic construct
  source 1..101: mol_type = other RNA
aaggttccatcccctgcaggcctggttgtagctccctgaaaccgttgctacaataaggccgtcgaaagatgtgccgcaacgctctgccttctggcatcgtt

SEQ ID NO: 1524 - RNA, 101 nt, synthetic construct
  source 1..101: mol_type = other RNA
agaccaggcctgcaggggatggaagttgtagctccctgaaaccgttgctacaataaggccgtcgaaagatgtgccgcaacgctctgccttctggcatcgtt

SEQ ID NO: 1525 - RNA, 101 nt, synthetic construct
  source 1..101: mol_type = other RNA
acttctggaaggttccatcccctggttgtagctccctgaaaccgttgctacaataaggccgtcgaaagatgtgccgcaacgctctgccttctggcatcgtt

SEQ ID NO: 1526 - RNA, 101 nt, synthetic construct
  source 1..101: mol_type = other RNA
cgatgaagcggggctccccgcggcgttgtagctccctgaaaccgttgctacaataaggccgtcgaaagatgtgccgcaacgctctgccttctggcatcgtt

SEQ ID NO: 1527 - RNA, 101 nt, synthetic construct
  source 1..101: mol_type = other RNA
tccgtgtcccggcccggccgcggggttgtagctccctgaaaccgttgctacaataaggccgtcgaaagatgtgccgcaacgctctgccttctggcatcgtt

SEQ ID NO: 1528 - RNA, 101 nt, synthetic construct
  source 1..101: mol_type = other RNA
ccgtgtcccggcccggccgcgggggttgtagctccctgaaaccgttgctacaataaggccgtcgaaagatgtgccgcaacgctctgccttctggcatcgtt

SEQ ID NO: 1529 - RNA, 101 nt, synthetic construct
  source 1..101: mol_type = other RNA
cagacgccgaggatggccgtcatggttgtagctccctgaaaccgttgctacaataaggccgtcgaaagatgtgccgcaacgctctgccttctggcatcgtt

SEQ ID NO: 1530 - RNA, 101 nt, synthetic construct
  source 1..101: mol_type = other RNA
ccagacgccgaggatggccgtcatgttgtagctccctgaaaccgttgctacaataaggccgtcgaaagatgtgccgcaacgctctgccttctggcatcgtt

SEQ ID NO: 1531 - RNA, 101 nt, synthetic construct
  source 1..101: mol_type = other RNA
agacgccgaggatggccgtcatgggttgtagctccctgaaaccgttgctacaataaggccgtcgaaagatgtgccgcaacgctctgccttctggcatcgtt

SEQ ID NO: 1532 - RNA, 101 nt, synthetic construct
  source 1..101: mol_type = other RNA
ctgtcgaaccgcacgaactgcgtggttgtagctccctgaaaccgttgctacaataaggccgtcgaaagatgtgccgcaacgctctgccttctggcatcgtt

SEQ ID NO: 1533 - RNA, 101 nt, synthetic construct
  source 1..101: mol_type = other RNA
tcgtgcggttcgacagcgacgccggttgtagctccctgaaaccgttgctacaataaggccgtcgaaagatgtgccgcaacgctctgccttctggcatcgtt

SEQ ID NO: 1534 - RNA, 101 nt, synthetic construct
  source 1..101: mol_type = other RNA
ccatccccatcgtgggcatcattggttgtagctccctgaaaccgttgctacaataaggccgtcgaaagatgtgccgcaacgctctgccttctggcatcgtt

SEQ ID NO: 1535 - RNA, 101 nt, synthetic construct
  source 1..101: mol_type = other RNA
tcctctggctcgcggcgtcgctgtgttgtagctccctgaaaccgttgctacaataaggccgtcgaaagatgtgccgcaacgctctgccttctggcatcgtt

SEQ ID NO: 1536 - RNA, 101 nt, synthetic construct
  source 1..101: mol_type = other RNA
ctctggttgtagtagccgcgcagggttgtagctccctgaaaccgttgctacaataaggccgtcgaaagatgtgccgcaacgctctgccttctggcatcgtt

SEQ ID NO: 1537 - RNA, 101 nt, synthetic construct
  source 1..101: mol_type = other RNA
acctggggaccctgcgcggctactgttgtagctccctgaaaccgttgctacaataaggccgtcgaaagatgtgccgcaacgctctgccttctggcatcgtt

SEQ ID NO: 1538 - RNA, 101 nt, synthetic construct
  source 1..101: mol_type = other RNA
cgctctggttgtagtagccgcgcagttgtagctccctgaaaccgttgctacaataaggccgtcgaaagatgtgccgcaacgctctgccttctggcatcgtt

SEQ ID NO: 1539 - RNA, 101 nt, synthetic construct
  source 1..101: mol_type = other RNA
gctctggttgtagtagccgcgcaggttgtagctccctgaaaccgttgctacaataaggccgtcgaaagatgtgccgcaacgctctgccttctggcatcgtt

SEQ ID NO: 1540 - RNA, 101 nt, synthetic construct
  source 1..101: mol_type = other RNA
tatttttttctatagtgtgagacagttgtagctccctgaaaccgttgctacaataaggccgtcgaaagatgtgccgcaacgctctgccttctggcatcgtt

SEQ ID NO: 1541 - RNA, 101 nt, synthetic construct
  source 1..101: mol_type = other RNA
acgcctacgacggcaaggattacagttgtagctccctgaaaccgttgctacaataaggccgtcgaaagatgtgccgcaacgctctgccttctggcatcgtt

SEQ ID NO: 1542 - RNA, 101 nt, synthetic construct
  source 1..101: mol_type = other RNA
tttgttctaccccaggcagtgacagttgtagctccctgaaaccgttgctacaataaggccgtcgaaagatgtgccgcaacgctctgccttctggcatcgtt

SEQ ID NO: 1543 - RNA, 101 nt, synthetic construct
  source 1..101: mol_type = other RNA
ttttgttctaccccaggcagtgacgttgtagctccctgaaaccgttgctacaataaggccgtcgaaagatgtgccgcaacgctctgccttctggcatcgtt

SEQ ID NO: 1544 - RNA, 101 nt, synthetic construct
  source 1..101: mol_type = other RNA
agcgaccacagctccagtgatcacgttgtagctccctgaaaccgttgctacaataaggccgtcgaaagatgtgccgcaacgctctgccttctggcatcgtt

SEQ ID NO: 1545 - RNA, 101 nt, synthetic construct
  source 1..101: mol_type = other RNA
gagctccgtgtcctgggtctggtcgttgtagctccctgaaaccgttgctacaataaggccgtcgaaagatgtgccgcaacgctctgccttctggcatcgtt

SEQ ID NO: 1546 - RNA, 101 nt, synthetic construct
  source 1..101: mol_type = other RNA
tccacgagctccgtgtcctgggtcgttgtagctccctgaaaccgttgctacaataaggccgtcgaaagatgtgccgcaacgctctgccttctggcatcgtt

SEQ ID NO: 1547 - RNA, 101 nt, synthetic construct
  source 1..101: mol_type = other RNA
acgagctccgtgtcctgggtctgggttgtagctccctgaaaccgttgctacaataaggccgtcgaaagatgtgccgcaacgctctgccttctggcatcgtt

SEQ ID NO: 1548 - RNA, 101 nt, synthetic construct
  source 1..101: mol_type = other RNA
cgagctccgtgtcctgggtctggtgttgtagctccctgaaaccgttgctacaataaggccgtcgaaagatgtgccgcaacgctctgccttctggcatcgtt

SEQ ID NO: 1549 - RNA, 101 nt, synthetic construct
  source 1..101: mol_type = other RNA
gcaggcctggtctccacgagctccgttgtagctccctgaaaccgttgctacaataaggccgtcgaaagatgtgccgcaacgctctgccttctggcatcgtt

SEQ ID NO: 1550 - RNA, 101 nt, synthetic construct
  source 1..101: mol_type = other RNA
tcccctgcaggcctggtctccacggttgtagctccctgaaaccgttgctacaataaggccgtcgaaagatgtgccgcaacgctctgccttctggcatcgtt

SEQ ID NO: 1551 - RNA, 101 nt, synthetic construct
  source 1..101: mol_type = other RNA
atccgtgtcccggcccggccgcgggttgtagctccctgaaaccgttgctacaataaggccgtcgaaagatgtgccgcaacgctctgccttctggcatcgtt

SEQ ID NO: 1552 - RNA, 101 nt, synthetic construct
  source 1..101: mol_type = other RNA
ccttcccgttctccaggtatctgcgttgtagctccctgaaaccgttgctacaataaggccgtcgaaagatgtgccgcaacgctctgccttctggcatcgtt

SEQ ID NO: 1553 - RNA, 101 nt, synthetic construct
  source 1..101: mol_type = other RNA
ccgttctccaggtatctgcggagcgttgtagctccctgaaaccgttgctacaataaggccgtcgaaagatgtgccgcaacgctctgccttctggcatcgtt

SEQ ID NO: 1554 - RNA, 101 nt, synthetic construct
  source 1..101: mol_type = other RNA
acctgccatgtgcagcatgagggtgttgtagctccctgaaaccgttgctacaataaggccgtcgaaagatgtgccgcaacgctctgccttctggcatcgtt

SEQ ID NO: 1555 - RNA, 101 nt, synthetic construct
  source 1..101: mol_type = other RNA
cacctgccatgtgcagcatgaggggttgtagctccctgaaaccgttgctacaataaggccgtcgaaagatgtgccgcaacgctctgccttctggcatcgtt

SEQ ID NO: 1556 - RNA, 101 nt, synthetic construct
  source 1..101: mol_type = other RNA
acctggcagcgggatggggaggacgttgtagctccctgaaaccgttgctacaataaggccgtcgaaagatgtgccgcaacgctctgccttctggcatcgtt

SEQ ID NO: 1557 - RNA, 101 nt, synthetic construct
  source 1..101: mol_type = other RNA
cactgacctggcagcgggatgggggttgtagctccctgaaaccgttgctacaataaggccgtcgaaagatgtgccgcaacgctctgccttctggcatcgtt

SEQ ID NO: 1558 - RNA, 101 nt, synthetic construct
  source 1..101: mol_type = other RNA
cctggcagcgggatggggaggaccgttgtagctccctgaaaccgttgctacaataaggccgtcgaaagatgtgccgcaacgctctgccttctggcatcgtt

SEQ ID NO: 1559 - RNA, 101 nt, synthetic construct
  source 1..101: mol_type = other RNA
ccatctcagggtgaggggcttggggttgtagctccctgaaaccgttgctacaataaggccgtcgaaagatgtgccgcaacgctctgccttctggcatcgtt

SEQ ID NO: 1560 - RNA, 101 nt, synthetic construct
  source 1..101: mol_type = other RNA
tggccgtcatggcgccccgaacccgttgtagctccctgaaaccgttgctacaataaggccgtcgaaagatgtgccgcaacgctctgccttctggcatcgtt

SEQ ID NO: 1561 - RNA, 101 nt, synthetic construct
  source 1..101: mol_type = other RNA
atgtccgccgcggtccaagagcgcgttgtagctccctgaaaccgttgctacaataaggccgtcgaaagatgtgccgcaacgctctgccttctggcatcgtt

SEQ ID NO: 1562 - RNA, 101 nt, synthetic construct
  source 1..101: mol_type = other RNA
ggtacccgtgcgctgcagcgtctcgttgtagctccctgaaaccgttgctacaataaggccgtcgaaagatgtgccgcaacgctctgccttctggcatcgtt

SEQ ID NO: 1563 - RNA, 101 nt, synthetic construct
  source 1..101: mol_type = other RNA
gggaaggagacgctgcagcgcacggttgtagctccctgaaaccgttgctacaataaggccgtcgaaagatgtgccgcaacgctctgccttctggcatcgtt

SEQ ID NO: 1564 - RNA, 101 nt, synthetic construct
  source 1..101: mol_type = other RNA
gcgggcgccgtggatagagcaggagttgtagctccctgaaaccgttgctacaataaggccgtcgaaagatgtgccgcaacgctctgccttctggcatcgtt

SEQ ID NO: 1565 - RNA, 101 nt, synthetic construct
  source 1..101: mol_type = other RNA
tcctgctctatccacggcgcccgcgttgtagctccctgaaaccgttgctacaataaggccgtcgaaagatgtgccgcaacgctctgccttctggcatcgtt

SEQ ID NO: 1566 - RNA, 101 nt, synthetic construct
  source 1..101: mol_type = other RNA
cccctggtacccgtgcgctgcagcgttgtagctccctgaaaccgttgctacaataaggccgtcgaaagatgtgccgcaacgctctgccttctggcatcgtt

SEQ ID NO: 1567 - RNA, 101 nt, synthetic construct
  source 1..101: mol_type = other RNA
tggtacccgtgcgctgcagcgtctgttgtagctccctgaaaccgttgctacaataaggccgtcgaaagatgtgccgcaacgctctgccttctggcatcgtt

SEQ ID NO: 1568 - RNA, 101 nt, synthetic construct
  source 1..101: mol_type = other RNA
catctcagggtgaggggcttgggcgttgtagctccctgaaaccgttgctacaataaggccgtcgaaagatgtgccgcaacgctctgccttctggcatcgtt

SEQ ID NO: 1569 - RNA, 101 nt, synthetic construct
  source 1..101: mol_type = other RNA
acgcagttcgtgcggttcgacagcgttgtagctccctgaaaccgttgctacaataaggccgtcgaaagatgtgccgcaacgctctgccttctggcatcgtt

SEQ ID NO: 1570 - RNA, 101 nt, synthetic construct
  source 1..101: mol_type = other RNA
cgcccaggtctgggtcagggccaggttgtagctccctgaaaccgttgctacaataaggccgtcgaaagatgtgccgcaacgctctgccttctggcatcgtt

SEQ ID NO: 1571 - RNA, 101 nt, synthetic construct
  source 1..101: mol_type = other RNA
cactcacccgcccaggtctgggtcgttgtagctccctgaaaccgttgctacaataaggccgtcgaaagatgtgccgcaacgctctgccttctggcatcgtt

SEQ ID NO: 1572 - RNA, 101 nt, synthetic construct
  source 1..101: mol_type = other RNA
ccgcccaggtctgggtcagggccagttgtagctccctgaaaccgttgctacaataaggccgtcgaaagatgtgccgcaacgctctgccttctggcatcgtt

SEQ ID NO: 1573 - RNA, 101 nt, synthetic construct
  source 1..101: mol_type = other RNA
cccgcccaggtctgggtcagggccgttgtagctccctgaaaccgttgctacaataaggccgtcgaaagatgtgccgcaacgctctgccttctggcatcgtt

SEQ ID NO: 1574 - RNA, 101 nt, synthetic construct
  source 1..101: mol_type = other RNA
cagcgacgccgcgagccagaggatgttgtagctccctgaaaccgttgctacaataaggccgtcgaaagatgtgccgcaacgctctgccttctggcatcgtt

SEQ ID NO: 1575 - RNA, 101 nt, synthetic construct
  source 1..101: mol_type = other RNA
cgcgagccagaggatggagccgcggttgtagctccctgaaaccgttgctacaataaggccgtcgaaagatgtgccgcaacgctctgccttctggcatcgtt

SEQ ID NO: 1576 - RNA, 101 nt, synthetic construct
  source 1..101: mol_type = other RNA
gctctatccacggcgcccgcggctgttgtagctccctgaaaccgttgctacaataaggccgtcgaaagatgtgccgcaacgctctgccttctggcatcgtt

SEQ ID NO: 1577 - RNA, 101 nt, synthetic construct; identical to SEQ ID NO: 1185
  source 1..101: mol_type = other RNA

SEQ ID NO: 1578 - RNA, 101 nt, synthetic construct
  source 1..101: mol_type = other RNA
cagacccaggacacggagctcgtggttgtagctccctgaaaccgttgctacaataaggccgtcgaaagatgtgccgcaacgctctgccttctggcatcgtt

SEQ ID NO: 1579 - RNA, 101 nt, synthetic construct
  source 1..101: mol_type = other RNA
ccaggacacggagctcgtggagacgttgtagctccctgaaaccgttgctacaataaggccgtcgaaagatgtgccgcaacgctctgccttctggcatcgtt

SEQ ID NO: 1580 - RNA, 101 nt, synthetic construct
  source 1..101: mol_type = other RNA
ctctgggaaaagaggggaaggtgagttgtagctccctgaaaccgttgctacaataaggccgtcgaaagatgtgccgcaacgctctgccttctggcatcgtt

SEQ ID NO: 1581 - RNA, 101 nt, synthetic construct
  source 1..101: mol_type = other RNA
tctgggaaaagaggggaaggtgaggttgtagctccctgaaaccgttgctacaataaggccgtcgaaagatgtgccgcaacgctctgccttctggcatcgtt

SEQ ID NO: 1582 - RNA, 101 nt, synthetic construct
  source 1..101: mol_type = other RNA
agacgctgcagcgcacgggtaccagttgtagctccctgaaaccgttgctacaataaggccgtcgaaagatgtgccgcaacgctctgccttctggcatcgtt

SEQ ID NO: 1583 - RNA, 101 nt, synthetic construct
  source 1..101: mol_type = other RNA
tccttttctatctgtgggaagaaagttgtagctccctgaaaccgttgctacaataaggccgtcgaaagatgtgccgcaacgctctgccttctggcatcgtt

SEQ ID NO: 1584 - RNA, 101 nt, synthetic construct
  source 1..101: mol_type = other RNA
cactgcctggggtagaacaaaaacgttgtagctccctgaaaccgttgctacaataaggccgtcgaaagatgtgccgcaacgctctgccttctggcatcgtt

SEQ ID NO: 1585 - RNA, 101 nt, synthetic construct
  source 1..101: mol_type = other RNA
acaaccagagcgaggccggtgagtgttgtagctccctgaaaccgttgctacaataaggccgtcgaaagatgtgccgcaacgctctgccttctggcatcgtt

SEQ ID NO: 1586 - RNA, 101 nt, synthetic construct
  source 1..101: mol_type = other RNA
ctacaaccagagcgaggccggtgagttgtagctccctgaaaccgttgctacaataaggccgtcgaaagatgtgccgcaacgctctgccttctggcatcgtt

SEQ ID NO: 1587 - RNA, 101 nt, synthetic construct
  source 1..101: mol_type = other RNA
tacaaccagagcgaggccggtgaggttgtagctccctgaaaccgttgctacaataaggccgtcgaaagatgtgccgcaacgctctgccttctggcatcgtt

SEQ ID NO: 1588 - RNA, 101 nt, synthetic construct
  source 1..101: mol_type = other RNA
ccagagcgaggccggtgagtgaccgttgtagctccctgaaaccgttgctacaataaggccgtcgaaagatgtgccgcaacgctctgccttctggcatcgtt

SEQ ID NO: 1589 - RNA, 101 nt, synthetic construct
  source 1..101: mol_type = other RNA
ccatcccgctgccaggtcagtgtggttgtagctccctgaaaccgttgctacaataaggccgtcgaaagatgtgccgcaacgctctgccttctggcatcgtt

SEQ ID NO: 1590 - RNA, 101 nt, synthetic construct
  source 1..101: mol_type = other RNA
gtatctgcggagccactccacgcagttgtagctccctgaaaccgttgctacaataaggccgtcgaaagatgtgccgcaacgctctgccttctggcatcgtt

SEQ ID NO: 1591-1604 - skipped (14 entries)

SEQ ID NO: 1605 - RNA, 101 nt, synthetic construct
  source 1..101: mol_type = other RNA
aaaacctgtcagtgattgggttccgttgtagctccctgaaaccgttgctacaataaggccgtcgaaagatgtgccgcaacgctctgccttctggcatcgtt

SEQ ID NO: 1606 - RNA, 101 nt, synthetic construct
  source 1..101: mol_type = other RNA
ttaggttcgtatctgtaaaaccaagttgtagctccctgaaaccgttgctacaataaggccgtcgaaagatgtgccgcaacgctctgccttctggcatcgtt

SEQ ID NO: 1607 - RNA, 101 nt, synthetic construct
  source 1..101: mol_type = other RNA
gtgtcctaccagcaaggggtcctggttgtagctccctgaaaccgttgctacaataaggccgtcgaaagatgtgccgcaacgctctgccttctggcatcgtt

SEQ ID NO: 1608 - RNA, 101 nt, synthetic construct
  source 1..101: mol_type = other RNA
tcaaagtaccctacaggaggaccagttgtagctccctgaaaccgttgctacaataaggccgtcgaaagatgtgccgcaacgctctgccttctggcatcgtt

SEQ ID NO: 1609 - RNA, 101 nt, synthetic construct
  source 1..101: mol_type = other RNA
agctgccgttctgcccagtccggggttgtagctccctgaaaccgttgctacaataaggccgtcgaaagatgtgccgcaacgctctgccttctggcatcgtt

SEQ ID NO: 1610 - RNA, 101 nt, synthetic construct
  source 1..101: mol_type = other RNA
gcatgggcaggggctggggtgcacgttgtagctccctgaaaccgttgctacaataaggccgtcgaaagatgtgccgcaacgctctgccttctggcatcgtt

SEQ ID NO: 1611 - RNA, 101 nt, synthetic construct
  source 1..101: mol_type = other RNA
gaatggcaggcggaggttgtactggttgtagctccctgaaaccgttgctacaataaggccgtcgaaagatgtgccgcaacgctctgccttctggcatcgtt

SEQ ID NO: 1612 - RNA, 101 nt, synthetic construct
  source 1..101: mol_type = other RNA
gtgagcaggcacctgtgccaacatgttgtagctccctgaaaccgttgctacaataaggccgtcgaaagatgtgccgcaacgctctgccttctggcatcgtt

SEQ ID NO: 1613-2000 - skipped (388 entries)

SEQ ID NO: 2001 - RNA, 100 nt, synthetic construct; identical to SEQ ID NO: 1001
  source 1..100: mol_type = other RNA
  modified_base 1: mod_base = OTHER; note = 2'-O-methyl modified nucleotide with phosphorothioate linkage
  modified_base 2: mod_base = OTHER; note = 2'-O-methyl modified nucleotide with phosphorothioate linkage
  modified_base 3: mod_base = OTHER; note = 2'-O-methyl modified nucleotide with phosphorothioate linkage
  modified_base 29: mod_base = OTHER; note = 2'-O-methyl modified nucleotide
  modified_base 30: mod_base = OTHER; note = 2'-O-methyl modified nucleotide
  modified_base 31: mod_base = OTHER; note = 2'-O-methyl modified nucleotide
  modified_base 32: mod_base = OTHER; note = 2'-O-methyl modified nucleotide
  modified_base 33: mod_base = OTHER; note = 2'-O-methyl modified nucleotide
  modified_base 34: mod_base = OTHER; note = 2'-O-methyl modified nucleotide
  modified_base 35: mod_base = OTHER; note = 2'-O-methyl modified nucleotide
  modified_base 36: mod_base = OTHER; note = 2'-O-methyl modified nucleotide
  modified_base 37: mod_base = OTHER; note = 2'-O-methyl modified nucleotide
  modified_base 38: mod_base = OTHER; note = 2'-O-methyl modified nucleotide
  modified_base 39: mod_base = OTHER; note = 2'-O-methyl modified nucleotide
  modified_base 40: mod_base = OTHER; note = 2'-O-methyl modified nucleotide
  modified_base 69: mod_base = OTHER; note = 2'-O-methyl modified nucleotide
  modified_base 70: mod_base = OTHER; note = 2'-O-methyl modified nucleotide
  modified_base 71: mod_base = OTHER; note = 2'-O-methyl modified nucleotide
  modified_base 72: mod_base = OTHER; note = 2'-O-methyl modified nucleotide
  modified_base 73: mod_base = OTHER; note = 2'-O-methyl modified nucleotide
  modified_base 74: mod_base = OTHER; note = 2'-O-methyl modified nucleotide
  modified_base 75: mod_base = OTHER; note = 2'-O-methyl modified nucleotide
  modified_base 76: mod_base = OTHER; note = 2'-O-methyl modified nucleotide
  modified_base 77: mod_base = OTHER; note = 2'-O-methyl modified nucleotide
  modified_base 78: mod_base = OTHER; note = 2'-O-methyl modified nucleotide
  modified_base 79: mod_base = OTHER; note = 2'-O-methyl modified nucleotide
  modified_base 80: mod_base = OTHER; note = 2'-O-methyl modified nucleotide
  modified_base 81: mod_base = OTHER; note = 2'-O-methyl modified nucleotide
  modified_base 82: mod_base = OTHER; note = 2'-O-methyl modified nucleotide
  modified_base 83: mod_base = OTHER; note = 2'-O-methyl modified nucleotide
  modified_base 84: mod_base = OTHER; note = 2'-O-methyl modified nucleotide
  modified_base 85: mod_base = OTHER; note = 2'-O-methyl modified nucleotide
  modified_base 86: mod_base = OTHER; note = 2'-O-methyl modified nucleotide
  modified_base 87: mod_base = OTHER; note = 2'-O-methyl modified nucleotide
  modified_base 88: mod_base = OTHER; note = 2'-O-methyl modified nucleotide
  modified_base 89: mod_base = OTHER; note = 2'-O-methyl modified nucleotide
  modified_base 90: mod_base = OTHER; note = 2'-O-methyl modified nucleotide
  modified_base 91: mod_base = OTHER; note = 2'-O-methyl modified nucleotide
  modified_base 92: mod_base = OTHER; note = 2'-O-methyl modified nucleotide
  modified_base 93: mod_base = OTHER; note = 2'-O-methyl modified nucleotide
  modified_base 94: mod_base = OTHER; note = 2'-O-methyl modified nucleotide
  modified_base 95: mod_base = OTHER; note = 2'-O-methyl modified nucleotide
  modified_base 96: mod_base = OTHER; note = 2'-O-methyl modified nucleotide
  modified_base 97: mod_base = OTHER; note = 2'-O-methyl modified nucleotide with phosphorothioate linkage
  modified_base 98: mod_base = OTHER; note = 2'-O-methyl modified nucleotide with phosphorothioate linkage
  modified_base 99: mod_base = OTHER; note = 2'-O-methyl modified nucleotide with phosphorothioate linkage
  modified_base 100: mod_base = OTHER; note = 2'-O-methyl modified nucleotide

SEQ ID NO: 2002 - RNA, 100 nt, synthetic construct; identical to SEQ ID NO: 1002
  source 1..100: mol_type = other RNA
  modified_base 1: mod_base = OTHER; note = 2'-O-methyl modified nucleotide with phosphorothioate linkage
  modified_base 2: mod_base = OTHER; note = 2'-O-methyl modified nucleotide with phosphorothioate linkage
  modified_base 3: mod_base = OTHER; note = 2'-O-methyl modified nucleotide with phosphorothioate linkage
  modified_base 29: mod_base = OTHER; note = 2'-O-methyl modified nucleotide
  modified_base 30: mod_base = OTHER; note = 2'-O-methyl modified nucleotide
  modified_base 31: mod_base = OTHER; note = 2'-O-methyl modified nucleotide
  modified_base 32: mod_base = OTHER; note = 2'-O-methyl modified nucleotide
  modified_base 33: mod_base = OTHER; note = 2'-O-methyl modified nucleotide
  modified_base 34: mod_base = OTHER; note = 2'-O-methyl modified nucleotide
  modified_base 35: mod_base = OTHER; note = 2'-O-methyl modified nucleotide
  modified_base 36: mod_base = OTHER; note = 2'-O-methyl modified nucleotide
  modified_base 37: mod_base = OTHER; note = 2'-O-methyl modified nucleotide
  modified_base 38: mod_base = OTHER; note = 2'-O-methyl modified nucleotide
  modified_base 39: mod_base = OTHER; note = 2'-O-methyl modified nucleotide
  modified_base 40: mod_base = OTHER; note = 2'-O-methyl modified nucleotide
  modified_base 69: mod_base = OTHER; note = 2'-O-methyl modified nucleotide
  modified_base 70: mod_base = OTHER; note = 2'-O-methyl modified nucleotide
  modified_base 71: mod_base = OTHER; note = 2'-O-methyl modified nucleotide
  modified_base 72: mod_base = OTHER; note = 2'-O-methyl modified nucleotide
  modified_base 73: mod_base = OTHER; note = 2'-O-methyl modified nucleotide
  modified_base 74: mod_base = OTHER; note = 2'-O-methyl modified nucleotide
  modified_base 75: mod_base = OTHER; note = 2'-O-methyl modified nucleotide
  modified_base 76: mod_base = OTHER; note = 2'-O-methyl modified nucleotide
  modified_base 77: mod_base = OTHER; note = 2'-O-methyl modified nucleotide
  modified_base 78: mod_base = OTHER; note = 2'-O-methyl modified nucleotide
  modified_base 79: mod_base = OTHER; note = 2'-O-methyl modified nucleotide
  modified_base 80: mod_base = OTHER; note = 2'-O-methyl modified nucleotide
  modified_base 81: mod_base = OTHER; note = 2'-O-methyl modified nucleotide
  modified_base 82: mod_base = OTHER; note = 2'-O-methyl modified nucleotide
  modified_base 83: mod_base = OTHER; note = 2'-O-methyl modified nucleotide
  modified_base 84: mod_base = OTHER; note = 2'-O-methyl modified nucleotide
  modified_base 85: mod_base = OTHER; note = 2'-O-methyl modified nucleotide
  modified_base 86: mod_base = OTHER; note = 2'-O-methyl modified nucleotide
  modified_base 87: mod_base = OTHER; note = 2'-O-methyl modified nucleotide
  modified_base 88: mod_base = OTHER; note = 2'-O-methyl modified nucleotide
  modified_base 89: mod_base = OTHER; note = 2'-O-methyl modified nucleotide
  modified_base 90: mod_base = OTHER; note = 2'-O-methyl modified nucleotide
  modified_base 91: mod_base = OTHER; note = 2'-O-methyl modified nucleotide
  modified_base 92: mod_base = OTHER; note = 2'-O-methyl modified nucleotide
  modified_base 93: mod_base = OTHER; note = 2'-O-methyl modified nucleotide
  modified_base 94: mod_base = OTHER; note = 2'-O-methyl modified nucleotide
  modified_base 95: mod_base = OTHER; note = 2'-O-methyl modified nucleotide
  modified_base 96: mod_base = OTHER; note = 2'-O-methyl modified nucleotide
  modified_base 97: mod_base = OTHER; note = 2'-O-methyl modified nucleotide with phosphorothioate linkage
  modified_base 98: mod_base = OTHER; note = 2'-O-methyl modified nucleotide with phosphorothioate linkage
  modified_base 99: mod_base = OTHER; note = 2'-O-methyl modified nucleotide with phosphorothioate linkage
  modified_base 100: mod_base = OTHER; note = 2'-O-methyl modified nucleotide

SEQ ID NO: 2003 - RNA, 100 nt, synthetic construct; identical to SEQ ID NO: 1003
  source 1..100: mol_type = other RNA
  modified_base 1: mod_base = OTHER; note = 2'-O-methyl modified nucleotide with phosphorothioate linkage
  modified_base 2: mod_base = OTHER; note = 2'-O-methyl modified nucleotide with phosphorothioate linkage
  modified_base 3: mod_base = OTHER; note = 2'-O-methyl modified nucleotide with phosphorothioate linkage
  modified_base 29: mod_base = OTHER; note = 2'-O-methyl modified nucleotide
  modified_base 30: mod_base = OTHER; note = 2'-O-methyl modified nucleotide
  modified_base 31: mod_base = OTHER; note = 2'-O-methyl modified nucleotide
  modified_base 32: mod_base = OTHER; note = 2'-O-methyl modified nucleotide
  modified_base 33: mod_base = OTHER; note = 2'-O-methyl modified nucleotide
  modified_base 34: mod_base = OTHER; note = 2'-O-methyl modified nucleotide
  modified_base 35: mod_base = OTHER; note = 2'-O-methyl modified nucleotide
  modified_base 36: mod_base = OTHER; note = 2'-O-methyl modified nucleotide
  modified_base 37: mod_base = OTHER; note = 2'-O-methyl modified nucleotide
  modified_base 38: mod_base = OTHER; note = 2'-O-methyl modified nucleotide
  modified_base 39: mod_base = OTHER; note = 2'-O-methyl modified nucleotide
  modified_base 40: mod_base = OTHER; note = 2'-O-methyl modified nucleotide
  modified_base 69: mod_base = OTHER; note = 2'-O-methyl modified nucleotide
  modified_base 70: mod_base = OTHER; note = 2'-O-methyl modified nucleotide
  modified_base 71: mod_base = OTHER; note = 2'-O-methyl modified nucleotide
  modified_base 72: mod_base = OTHER; note = 2'-O-methyl modified nucleotide
  modified_base 73: mod_base = OTHER; note = 2'-O-methyl modified nucleotide
  modified_base 74: mod_base = OTHER; note = 2'-O-methyl modified nucleotide
  modified_base 75: mod_base = OTHER; note = 2'-O-methyl modified nucleotide
  modified_base 76: mod_base = OTHER; note = 2'-O-methyl modified nucleotide
  modified_base 77: mod_base = OTHER; note = 2'-O-methyl modified nucleotide
  modified_base 78: mod_base = OTHER; note = 2'-O-methyl modified nucleotide
  modified_base 79: mod_base = OTHER; note = 2'-O-methyl modified nucleotide
  modified_base 80: mod_base = OTHER; note = 2'-O-methyl modified nucleotide
  modified_base 81: mod_base = OTHER; note = 2'-O-methyl modified nucleotide
  modified_base 82: mod_base = OTHER; note = 2'-O-methyl modified nucleotide
  modified_base 83: mod_base = OTHER; note = 2'-O-methyl modified nucleotide
  modified_base 84: mod_base = OTHER; note = 2'-O-methyl modified nucleotide
  modified_base 85: mod_base = OTHER; note = 2'-O-methyl modified nucleotide
  modified_base 86: mod_base = OTHER; note = 2'-O-methyl modified nucleotide
  modified_base 87: mod_base = OTHER; note = 2'-O-methyl modified nucleotide
  modified_base 88: mod_base = OTHER; note = 2'-O-methyl modified nucleotide
  modified_base 89: mod_base = OTHER; note = 2'-O-methyl modified nucleotide
  modified_base 90: mod_base = OTHER; note = 2'-O-methyl modified nucleotide
  modified_base 91: mod_base = OTHER; note = 2'-O-methyl modified nucleotide
  modified_base 92: mod_base = OTHER; note = 2'-O-methyl modified nucleotide
  modified_base 93: mod_base = OTHER; note = 2'-O-methyl modified nucleotide
  modified_base 94: mod_base = OTHER; note = 2'-O-methyl modified nucleotide
  modified_base 95: mod_base = OTHER; note = 2'-O-methyl modified nucleotide
  modified_base 96: mod_base = OTHER; note = 2'-O-methyl modified nucleotide
  modified_base 97: mod_base = OTHER; note = 2'-O-methyl modified nucleotide with phosphorothioate linkage
  modified_base 98: mod_base = OTHER; note = 2'-O-methyl modified nucleotide with phosphorothioate linkage
  modified_base 99: mod_base = OTHER; note = 2'-O-methyl modified nucleotide with phosphorothioate linkage
  modified_base 100: mod_base = OTHER; note = 2'-O-methyl modified nucleotide

SEQ ID NO: 2004 - RNA, 100 nt, synthetic construct; identical to SEQ ID NO: 1004
  source 1..100: mol_type = other RNA
  modified_base 1: mod_base = OTHER; note = 2'-O-methyl modified nucleotide with phosphorothioate linkage
  modified_base 2: mod_base = OTHER; note = 2'-O-methyl modified nucleotide with phosphorothioate linkage
  modified_base 3: mod_base = OTHER; note = 2'-O-methyl modified nucleotide with phosphorothioate linkage
  modified_base 29: mod_base = OTHER; note = 2'-O-methyl modified nucleotide
  modified_base 30: mod_base = OTHER; note = 2'-O-methyl modified nucleotide
  modified_base 31: mod_base = OTHER; note = 2'-O-methyl modified nucleotide
  modified_base 32: mod_base = OTHER; note = 2'-O-methyl modified nucleotide
  modified_base 33: mod_base = OTHER; note = 2'-O-methyl modified nucleotide
  modified_base 34: mod_base = OTHER; note = 2'-O-methyl modified nucleotide
  modified_base 35: mod_base = OTHER; note = 2'-O-methyl modified nucleotide
  modified_base 36: mod_base = OTHER; note = 2'-O-methyl modified nucleotide
  modified_base 37: mod_base = OTHER; note = 2'-O-methyl modified nucleotide
  modified_base 38: mod_base = OTHER; note = 2'-O-methyl modified nucleotide
  modified_base 39: mod_base = OTHER; note = 2'-O-methyl modified nucleotide
  modified_base 40: mod_base = OTHER; note = 2'-O-methyl modified nucleotide
  modified_base 69: mod_base = OTHER; note = 2'-O-methyl modified nucleotide
  modified_base 70: mod_base = OTHER; note = 2'-O-methyl modified nucleotide
  modified_base 71: mod_base = OTHER; note = 2'-O-methyl modified nucleotide
  modified_base 72: mod_base = OTHER; note = 2'-O-methyl modified nucleotide
  modified_base 73: mod_base = OTHER; note = 2'-O-methyl modified nucleotide
  modified_base 74: mod_base = OTHER; note = 2'-O-methyl modified nucleotide
  modified_base 75: mod_base = OTHER; note = 2'-O-methyl modified nucleotide
  modified_base 76: mod_base = OTHER; note = 2'-O-methyl modified nucleotide
  modified_base 77: mod_base = OTHER; note = 2'-O-methyl modified nucleotide
  modified_base 78: mod_base = OTHER; note = 2'-O-methyl modified nucleotide
  modified_base 79: mod_base = OTHER; note = 2'-O-methyl modified nucleotide
  modified_base 80: mod_base = OTHER; note = 2'-O-methyl modified nucleotide
  modified_base 81: mod_base = OTHER; note = 2'-O-methyl modified nucleotide
  modified_base 82: mod_base = OTHER; note = 2'-O-methyl modified nucleotide
  modified_base 83: mod_base = OTHER; note = 2'-O-methyl modified nucleotide
  modified_base 84: mod_base = OTHER; note = 2'-O-methyl modified nucleotide
  modified_base 85: mod_base = OTHER; note = 2'-O-methyl modified nucleotide
  modified_base 86: mod_base = OTHER; note = 2'-O-methyl modified nucleotide
  modified_base 87: mod_base = OTHER; note = 2'-O-methyl modified nucleotide
  modified_base 88: mod_base = OTHER; note = 2'-O-methyl modified nucleotide
  modified_base 89: mod_base = OTHER; note = 2'-O-methyl modified nucleotide
  modified_base 90: mod_base = OTHER; note = 2'-O-methyl modified nucleotide
  modified_base 91: mod_base = OTHER; note = 2'-O-methyl modified nucleotide
  modified_base 92: mod_base = OTHER; note = 2'-O-methyl modified nucleotide
  modified_base 93: mod_base = OTHER; note = 2'-O-methyl modified nucleotide
  modified_base 94: mod_base = OTHER; note = 2'-O-methyl modified nucleotide
  modified_base 95: mod_base = OTHER; note = 2'-O-methyl modified nucleotide
  modified_base 96: mod_base = OTHER; note = 2'-O-methyl modified nucleotide
  modified_base 97: mod_base = OTHER; note = 2'-O-methyl modified nucleotide with phosphorothioate linkage
  modified_base 98: mod_base = OTHER; note = 2'-O-methyl modified nucleotide with phosphorothioate linkage
  modified_base 99: mod_base = OTHER; note = 2'-O-methyl modified nucleotide with phosphorothioate linkage
  modified_base 100: mod_base = OTHER; note = 2'-O-methyl modified nucleotide

SEQ ID NO: 2005 - RNA, 100 nt, synthetic construct; identical to SEQ ID NO: 1005
  source 1..100: mol_type = other RNA
  modified_base 1: mod_base = OTHER; note = 2'-O-methyl modified nucleotide with phosphorothioate linkage
  modified_base 2: mod_base = OTHER; note = 2'-O-methyl modified nucleotide with phosphorothioate linkage
  modified_base 3: mod_base = OTHER; note = 2'-O-methyl modified nucleotide with phosphorothioate linkage
  modified_base 29: mod_base = OTHER; note = 2'-O-methyl modified nucleotide
  modified_base 30: mod_base = OTHER; note = 2'-O-methyl modified nucleotide
  modified_base 31: mod_base = OTHER; note = 2'-O-methyl modified nucleotide
  modified_base 32: mod_base = OTHER; note = 2'-O-methyl modified nucleotide
  modified_base 33: mod_base = OTHER; note = 2'-O-methyl modified nucleotide
  modified_base 34: mod_base = OTHER; note = 2'-O-methyl modified nucleotide
  modified_base 35: mod_base = OTHER; note = 2'-O-methyl modified nucleotide
  modified_base 36: mod_base = OTHER; note = 2'-O-methyl modified nucleotide
  modified_base 37: mod_base = OTHER; note = 2'-O-methyl modified nucleotide
  modified_base 38: mod_base = OTHER; note = 2'-O-methyl modified nucleotide
  modified_base 39: mod_base = OTHER; note = 2'-O-methyl modified nucleotide
  modified_base 40: mod_base = OTHER; note = 2'-O-methyl modified nucleotide
  modified_base 69: mod_base = OTHER; note = 2'-O-methyl modified nucleotide
  modified_base 70: mod_base = OTHER; note = 2'-O-methyl modified nucleotide
  modified_base 71: mod_base = OTHER; note = 2'-O-methyl modified nucleotide
  modified_base 72: mod_base = OTHER; note = 2'-O-methyl modified nucleotide
  modified_base 73: mod_base = OTHER; note = 2'-O-methyl modified nucleotide
  modified_base 74: mod_base = OTHER; note = 2'-O-methyl modified nucleotide
  modified_base 75: mod_base = OTHER; note = 2'-O-methyl modified nucleotide
  modified_base 76: mod_base = OTHER; note = 2'-O-methyl modified nucleotide
  modified_base 77: mod_base = OTHER; note = 2'-O-methyl modified nucleotide
  modified_base 78: mod_base = OTHER; note = 2'-O-methyl modified nucleotide
  modified_base 79: mod_base = OTHER; note = 2'-O-methyl modified nucleotide
  modified_base 80: mod_base = OTHER; note = 2'-O-methyl modified nucleotide
  modified_base 81: mod_base = OTHER; note = 2'-O-methyl modified nucleotide
  modified_base 82: mod_base = OTHER; note = 2'-O-methyl modified nucleotide
  modified_base 83: mod_base = OTHER; note = 2'-O-methyl modified nucleotide
  modified_base 84: mod_base = OTHER; note = 2'-O-methyl modified nucleotide
  modified_base 85: mod_base = OTHER; note = 2'-O-methyl modified nucleotide
  modified_base 86: mod_base = OTHER; note = 2'-O-methyl modified nucleotide
  modified_base 87: mod_base = OTHER; note = 2'-O-methyl modified nucleotide
  modified_base 88: mod_base = OTHER; note = 2'-O-methyl modified nucleotide
  modified_base 89: mod_base = OTHER; note = 2'-O-methyl modified nucleotide
  modified_base 90: mod_base = OTHER; note = 2'-O-methyl modified nucleotide
  modified_base 91: mod_base = OTHER; note = 2'-O-methyl modified nucleotide
  modified_base 92: mod_base = OTHER; note = 2'-O-methyl modified nucleotide
  modified_base 93: mod_base = OTHER; note = 2'-O-methyl modified nucleotide
  modified_base 94: mod_base = OTHER; note = 2'-O-methyl modified nucleotide
  modified_base 95: mod_base = OTHER; note = 2'-O-methyl modified nucleotide
  modified_base 96: mod_base = OTHER; note = 2'-O-methyl modified nucleotide
  modified_base 97: mod_base = OTHER; note = 2'-O-methyl modified nucleotide with phosphorothioate linkage
  modified_base 98: mod_base = OTHER; note = 2'-O-methyl modified nucleotide with phosphorothioate linkage
  modified_base 99: mod_base = OTHER; note = 2'-O-methyl modified nucleotide with phosphorothioate linkage
  modified_base 100: mod_base = OTHER; note = 2'-O-methyl modified nucleotide

SEQ ID NO: 2006 - RNA, 100 nt, synthetic construct; identical to SEQ ID NO: 1006
  source 1..100: mol_type = other RNA
  modified_base 1: mod_base = OTHER; note = 2'-O-methyl modified nucleotide with phosphorothioate linkage
  modified_base 2: mod_base = OTHER; note = 2'-O-methyl modified nucleotide with phosphorothioate linkage
  modified_base 3: mod_base = OTHER; note = 2'-O-methyl modified nucleotide with phosphorothioate linkage
  modified_base 29: mod_base = OTHER; note = 2'-O-methyl modified nucleotide
  modified_base 30: mod_base = OTHER; note = 2'-O-methyl modified nucleotide
  modified_base 31: mod_base = OTHER; note = 2'-O-methyl modified nucleotide
  modified_base 32: mod_base = OTHER; note = 2'-O-methyl modified nucleotide
  modified_base 33: mod_base = OTHER; note = 2'-O-methyl modified nucleotide
  modified_base 34: mod_base = OTHER; note = 2'-O-methyl modified nucleotide
  modified_base 35: mod_base = OTHER; note = 2'-O-methyl modified nucleotide
  modified_base 36: mod_base = OTHER; note = 2'-O-methyl modified nucleotide
  modified_base 37: mod_base = OTHER; note = 2'-O-methyl modified nucleotide
  modified_base 38: mod_base = OTHER; note = 2'-O-methyl modified nucleotide
  modified_base 39: mod_base = OTHER; note = 2'-O-methyl modified nucleotide
  modified_base 40: mod_base = OTHER; note = 2'-O-methyl modified nucleotide
  modified_base 69: mod_base = OTHER; note = 2'-O-methyl modified nucleotide
  modified_base 70: mod_base = OTHER; note = 2'-O-methyl modified nucleotide
  modified_base 71: mod_base = OTHER; note = 2'-O-methyl modified nucleotide
  modified_base 72: mod_base = OTHER; note = 2'-O-methyl modified nucleotide
  modified_base 73: mod_base = OTHER; note = 2'-O-methyl modified nucleotide
  modified_base 74: mod_base = OTHER; note = 2'-O-methyl modified nucleotide
  modified_base 75: mod_base = OTHER; note = 2'-O-methyl modified nucleotide
  modified_base 76: mod_base = OTHER; note = 2'-O-methyl modified nucleotide
  modified_base 77: mod_base = OTHER; note = 2'-O-methyl modified nucleotide
  modified_base 78: mod_base = OTHER; note = 2'-O-methyl modified nucleotide
  modified_base 79: mod_base = OTHER; note = 2'-O-methyl modified nucleotide
  modified_base 80: mod_base = OTHER; note = 2'-O-methyl modified nucleotide
  modified_base 81: mod_base = OTHER; note = 2'-O-methyl modified nucleotide
  modified_base 82: mod_base = OTHER; note = 2'-O-methyl modified nucleotide
  modified_base 83: mod_base = OTHER; note = 2'-O-methyl modified nucleotide
  modified_base 84: mod_base = OTHER; note = 2'-O-methyl modified nucleotide
  modified_base 85: mod_base = OTHER; note = 2'-O-methyl modified nucleotide
  modified_base 86: mod_base = OTHER; note = 2'-O-methyl modified nucleotide
  modified_base 87: mod_base = OTHER; note = 2'-O-methyl modified nucleotide
  modified_base 88: mod_base = OTHER; note = 2'-O-methyl modified nucleotide
  modified_base 89: mod_base = OTHER; note = 2'-O-methyl modified nucleotide
  modified_base 90: mod_base = OTHER; note = 2'-O-methyl modified nucleotide
  modified_base 91: mod_base = OTHER; note = 2'-O-methyl modified nucleotide
  modified_base 92: mod_base = OTHER; note = 2'-O-methyl modified nucleotide
  modified_base 93: mod_base = OTHER; note = 2'-O-methyl modified nucleotide
  modified_base 94: mod_base = OTHER; note = 2'-O-methyl modified nucleotide
  modified_base 95: mod_base = OTHER; note = 2'-O-methyl modified nucleotide
  modified_base 96: mod_base = OTHER; note = 2'-O-methyl modified nucleotide
  modified_base 97: mod_base = OTHER; note = 2'-O-methyl modified nucleotide with phosphorothioate linkage
  modified_base 98: mod_base = OTHER; note = 2'-O-methyl modified nucleotide with phosphorothioate linkage
  modified_base 99: mod_base = OTHER; note = 2'-O-methyl modified nucleotide with phosphorothioate linkage
  modified_base 100: mod_base = OTHER; note = 2'-O-methyl modified nucleotide

SEQ ID NO: 2007 - RNA, 100 nt, synthetic construct; identical to SEQ ID NO: 1007
  source 1..100: mol_type = other RNA
  modified_base 1: mod_base = OTHER; note = 2'-O-methyl modified nucleotide with phosphorothioate linkage
  modified_base 2: mod_base = OTHER; note = 2'-O-methyl modified nucleotide with phosphorothioate linkage
  modified_base 3: mod_base = OTHER; note = 2'-O-methyl modified nucleotide with phosphorothioate linkage
  modified_base 29: mod_base = OTHER; note = 2'-O-methyl modified nucleotide
  modified_base 30: mod_base = OTHER; note = 2'-O-methyl modified nucleotide
  modified_base 31: mod_base = OTHER; note = 2'-O-methyl modified nucleotide
  modified_base 32: mod_base = OTHER; note = 2'-O-methyl modified nucleotide
  modified_base 33: mod_base = OTHER; note = 2'-O-methyl modified nucleotide
  modified_base 34: mod_base = OTHER; note = 2'-O-methyl modified nucleotide
  modified_base 35: mod_base = OTHER; note = 2'-O-methyl modified nucleotide
  modified_base 36: mod_base = OTHER; note = 2'-O-methyl modified nucleotide
  modified_base 37: mod_base = OTHER; note = 2'-O-methyl modified nucleotide
  modified_base 38: mod_base = OTHER; note = 2'-O-methyl modified nucleotide
  modified_base 39: mod_base = OTHER; note = 2'-O-methyl modified nucleotide
  modified_base 40: mod_base = OTHER; note = 2'-O-methyl modified nucleotide
  modified_base 69: mod_base = OTHER; note = 2'-O-methyl modified nucleotide
  modified_base 70: mod_base = OTHER; note = 2'-O-methyl modified nucleotide
  modified_base 71: mod_base = OTHER; note = 2'-O-methyl modified nucleotide
  modified_base 72: mod_base = OTHER; note = 2'-O-methyl modified nucleotide
  modified_base 73: mod_base = OTHER; note = 2'-O-methyl modified nucleotide
  modified_base 74: mod_base = OTHER; note = 2'-O-methyl modified nucleotide
  modified_base 75: mod_base = OTHER; note = 2'-O-methyl modified nucleotide
  modified_base 76: mod_base = OTHER; note = 2'-O-methyl modified nucleotide
  modified_base 77: mod_base = OTHER; note = 2'-O-methyl modified nucleotide
  modified_base 78: mod_base = OTHER; note = 2'-O-methyl modified nucleotide
  modified_base 79: mod_base = OTHER; note = 2'-O-methyl modified nucleotide
  modified_base 80: mod_base = OTHER; note = 2'-O-methyl modified nucleotide
  modified_base 81: mod_base = OTHER; note = 2'-O-methyl modified nucleotide
  modified_base 82: mod_base = OTHER; note = 2'-O-methyl modified nucleotide
  modified_base 83: mod_base = OTHER; note = 2'-O-methyl modified nucleotide
  modified_base 84: mod_base = OTHER; note = 2'-O-methyl modified nucleotide
  modified_base 85: mod_base = OTHER; note = 2'-O-methyl modified nucleotide
  modified_base 86: mod_base = OTHER; note = 2'-O-methyl modified nucleotide
  modified_base 87: mod_base = OTHER; note = 2'-O-methyl modified nucleotide
  modified_base 88: mod_base = OTHER; note = 2'-O-methyl modified nucleotide
  modified_base 89: mod_base = OTHER; note = 2'-O-methyl modified nucleotide
  modified_base 90: mod_base = OTHER; note = 2'-O-methyl modified nucleotide
  modified_base 91: mod_base = OTHER; note = 2'-O-methyl modified nucleotide
  modified_base 92: mod_base = OTHER; note = 2'-O-methyl modified nucleotide
  modified_base 93: mod_base = OTHER; note = 2'-O-methyl modified nucleotide
  modified_base 94: mod_base = OTHER; note = 2'-O-methyl modified nucleotide
  modified_base 95: mod_base = OTHER; note = 2'-O-methyl modified nucleotide
  modified_base 96: mod_base = OTHER; note = 2'-O-methyl modified nucleotide
  modified_base 97: mod_base = OTHER; note = 2'-O-methyl modified nucleotide with phosphorothioate linkage
  modified_base 98: mod_base = OTHER; note = 2'-O-methyl modified nucleotide with phosphorothioate linkage
  modified_base 99: mod_base = OTHER; note = 2'-O-methyl modified nucleotide with phosphorothioate linkage
  modified_base 100: mod_base = OTHER; note = 2'-O-methyl modified nucleotide

SEQ ID NO: 2008 - RNA, 100 nt, synthetic construct; identical to SEQ ID NO: 1008
  source 1..100: mol_type = other RNA
  modified_base 1: mod_base = OTHER; note = 2'-O-methyl modified nucleotide with phosphorothioate linkage
  modified_base 2: mod_base = OTHER; note = 2'-O-methyl modified nucleotide with phosphorothioate linkage
  modified_base 3: mod_base = OTHER; note = 2'-O-methyl modified nucleotide with phosphorothioate linkage
  modified_base 29: mod_base = OTHER; note = 2'-O-methyl modified nucleotide
  modified_base 30: mod_base = OTHER; note = 2'-O-methyl modified nucleotide
  modified_base 31: mod_base = OTHER; note = 2'-O-methyl modified nucleotide
  modified_base 32: mod_base = OTHER; note = 2'-O-methyl modified nucleotide
  modified_base 33: mod_base = OTHER; note = 2'-O-methyl modified nucleotide
  modified_base 34: mod_base = OTHER; note = 2'-O-methyl modified nucleotide
  modified_base 35: mod_base = OTHER; note = 2'-O-methyl modified nucleotide
  modified_base 36: mod_base = OTHER; note = 2'-O-methyl modified nucleotide
  modified_base 37: mod_base = OTHER; note = 2'-O-methyl modified nucleotide
  modified_base 38: mod_base = OTHER; note = 2'-O-methyl modified nucleotide
  modified_base 39: mod_base = OTHER; note = 2'-O-methyl modified nucleotide
  modified_base 40: mod_base = OTHER; note = 2'-O-methyl modified nucleotide
  modified_base 69: mod_base = OTHER; note = 2'-O-methyl modified nucleotide
  modified_base 70: mod_base = OTHER; note = 2'-O-methyl modified nucleotide
  modified_base 71: mod_base = OTHER; note = 2'-O-methyl modified nucleotide
  modified_base 72: mod_base = OTHER; note = 2'-O-methyl modified nucleotide
  modified_base 73: mod_base = OTHER; note = 2'-O-methyl modified nucleotide
  modified_base 74: mod_base = OTHER; note = 2'-O-methyl modified nucleotide
  modified_base 75: mod_base = OTHER; note = 2'-O-methyl modified nucleotide
  modified_base 76: mod_base = OTHER; note = 2'-O-methyl modified nucleotide
  modified_base 77: mod_base = OTHER; note = 2'-O-methyl modified nucleotide
  modified_base 78: mod_base = OTHER; note = 2'-O-methyl modified nucleotide
  modified_base 79: mod_base = OTHER; note = 2'-O-methyl modified nucleotide
  modified_base 80: mod_base = OTHER; note = 2'-O-methyl modified nucleotide
  modified_base 81: mod_base = OTHER; note = 2'-O-methyl modified nucleotide
  modified_base 82: mod_base = OTHER; note = 2'-O-methyl modified nucleotide
  modified_base 83: mod_base = OTHER; note = 2'-O-methyl modified nucleotide
  modified_base 84: mod_base = OTHER; note = 2'-O-methyl modified nucleotide
  modified_base 85: mod_base = OTHER; note = 2'-O-methyl modified nucleotide
  modified_base 86: mod_base = OTHER; note = 2'-O-methyl modified nucleotide
  modified_base 87: mod_base = OTHER; note = 2'-O-methyl modified nucleotide
  modified_base 88: mod_base = OTHER; note = 2'-O-methyl modified nucleotide
  modified_base 89: mod_base = OTHER; note = 2'-O-methyl modified nucleotide
  modified_base 90: mod_base = OTHER; note = 2'-O-methyl modified nucleotide
  modified_base 91: mod_base = OTHER; note = 2'-O-methyl modified nucleotide
  modified_base 92: mod_base = OTHER; note = 2'-O-methyl modified nucleotide
  modified_base 93: mod_base = OTHER; note = 2'-O-methyl modified nucleotide
  modified_base 94: mod_base = OTHER; note = 2'-O-methyl modified nucleotide
  modified_base 95: mod_base = OTHER; note = 2'-O-methyl modified nucleotide
  modified_base 96: mod_base = OTHER; note = 2'-O-methyl modified nucleotide
  modified_base 97: mod_base = OTHER; note = 2'-O-methyl modified nucleotide with phosphorothioate linkage
  modified_base 98: mod_base = OTHER; note = 2'-O-methyl modified nucleotide with phosphorothioate linkage
  modified_base 99: mod_base = OTHER; note = 2'-O-methyl modified nucleotide with phosphorothioate linkage
  modified_base 100: mod_base = OTHER; note = 2'-O-methyl modified nucleotide

SEQ ID NO: 2009 - RNA, 100 nt, synthetic construct; identical to SEQ ID NO: 1009
  source 1..100: mol_type = other RNA
  modified_base 1: mod_base = OTHER; note = 2'-O-methyl modified nucleotide with phosphorothioate linkage
  modified_base 2: mod_base = OTHER; note = 2'-O-methyl modified nucleotide with phosphorothioate linkage
  modified_base 3: mod_base = OTHER; note = 2'-O-methyl modified nucleotide with phosphorothioate linkage
  modified_base 29: mod_base = OTHER; note = 2'-O-methyl modified nucleotide
  modified_base 30: mod_base = OTHER; note = 2'-O-methyl modified nucleotide
  modified_base 31: mod_base = OTHER; note = 2'-O-methyl modified nucleotide
  modified_base 32: mod_base = OTHER; note = 2'-O-methyl modified nucleotide
  modified_base 33: mod_base = OTHER; note = 2'-O-methyl modified nucleotide
  modified_base 34: mod_base = OTHER; note = 2'-O-methyl modified nucleotide
  modified_base 35: mod_base = OTHER; note = 2'-O-methyl modified nucleotide
  modified_base 36: mod_base = OTHER; note = 2'-O-methyl modified nucleotide
  modified_base 37: mod_base = OTHER; note = 2'-O-methyl modified nucleotide
  modified_base 38: mod_base = OTHER; note = 2'-O-methyl modified nucleotide
  modified_base 39: mod_base = OTHER; note = 2'-O-methyl modified nucleotide
  modified_base 40: mod_base = OTHER; note = 2'-O-methyl modified nucleotide
  modified_base 69: mod_base = OTHER; note = 2'-O-methyl modified nucleotide
  modified_base 70: mod_base = OTHER; note = 2'-O-methyl modified nucleotide
  modified_base 71: mod_base = OTHER; note = 2'-O-methyl modified nucleotide
  modified_base 72: mod_base = OTHER; note = 2'-O-methyl modified nucleotide
  modified_base 73: mod_base = OTHER; note = 2'-O-methyl modified nucleotide
  modified_base 74: mod_base = OTHER; note = 2'-O-methyl modified nucleotide
  modified_base 75: mod_base = OTHER; note = 2'-O-methyl modified nucleotide
  modified_base 76: mod_base = OTHER; note = 2'-O-methyl modified nucleotide
  modified_base 77: mod_base = OTHER; note = 2'-O-methyl modified nucleotide
  modified_base 78: mod_base = OTHER; note = 2'-O-methyl modified nucleotide
  modified_base 79: mod_base = OTHER; note = 2'-O-methyl modified nucleotide
  modified_base 80: mod_base = OTHER; note = 2'-O-methyl modified nucleotide
  modified_base 81: mod_base = OTHER; note = 2'-O-methyl modified nucleotide
  modified_base 82: mod_base = OTHER; note = 2'-O-methyl modified nucleotide
  modified_base 83: mod_base = OTHER; note = 2'-O-methyl modified nucleotide
  modified_base 84: mod_base = OTHER; note = 2'-O-methyl modified nucleotide
  modified_base 85: mod_base = OTHER; note = 2'-O-methyl modified nucleotide
  modified_base 86: mod_base = OTHER; note = 2'-O-methyl modified nucleotide
  modified_base 87: mod_base = OTHER; note = 2'-O-methyl modified nucleotide
  modified_base 88: mod_base = OTHER; note = 2'-O-methyl modified nucleotide
  modified_base 89: mod_base = OTHER; note = 2'-O-methyl modified nucleotide
  modified_base 90: mod_base = OTHER; note = 2'-O-methyl modified nucleotide
  modified_base 91: mod_base = OTHER; note = 2'-O-methyl modified nucleotide
  modified_base 92: mod_base = OTHER; note = 2'-O-methyl modified nucleotide
  modified_base 93: mod_base = OTHER; note = 2'-O-methyl modified nucleotide
  modified_base 94: mod_base = OTHER; note = 2'-O-methyl modified nucleotide
  modified_base 95: mod_base = OTHER; note = 2'-O-methyl modified nucleotide
  modified_base 96: mod_base = OTHER; note = 2'-O-methyl modified nucleotide
  modified_base 97: mod_base = OTHER; note = 2'-O-methyl modified nucleotide with phosphorothioate linkage
  modified_base 98: mod_base = OTHER; note = 2'-O-methyl modified nucleotide with phosphorothioate linkage
  modified_base 99: mod_base = OTHER; note = 2'-O-methyl modified nucleotide with phosphorothioate linkage
  modified_base 100: mod_base = OTHER; note = 2'-O-methyl modified nucleotide

SEQ ID NO: 2010 - RNA, 100 nt, synthetic construct; identical to SEQ ID NO: 1010
  source 1..100: mol_type = other RNA
  modified_base 1: mod_base = OTHER; note = 2'-O-methyl modified nucleotide with phosphorothioate linkage
  modified_base 2: mod_base = OTHER; note = 2'-O-methyl modified nucleotide with phosphorothioate linkage
  modified_base 3: mod_base = OTHER; note = 2'-O-methyl modified nucleotide with phosphorothioate linkage
  modified_base 29: mod_base = OTHER; note = 2'-O-methyl modified nucleotide
  modified_base 30: mod_base = OTHER; note = 2'-O-methyl modified nucleotide
  modified_base 31: mod_base = OTHER; note = 2'-O-methyl modified nucleotide
  modified_base 32: mod_base = OTHER; note = 2'-O-methyl modified nucleotide
  modified_base 33: mod_base = OTHER; note = 2'-O-methyl modified nucleotide
  modified_base 34: mod_base = OTHER; note = 2'-O-methyl modified nucleotide
  modified_base 35: mod_base = OTHER; note = 2'-O-methyl modified nucleotide
  modified_base 36: mod_base = OTHER; note = 2'-O-methyl modified nucleotide
  modified_base 37: mod_base = OTHER; note = 2'-O-methyl modified nucleotide
  modified_base 38: mod_base = OTHER; note = 2'-O-methyl modified nucleotide
  modified_base 39: mod_base = OTHER; note = 2'-O-methyl modified nucleotide
  modified_base 40: mod_base = OTHER; note = 2'-O-methyl modified nucleotide
  modified_base 69: mod_base = OTHER; note = 2'-O-methyl modified nucleotide
  modified_base 70: mod_base = OTHER; note = 2'-O-methyl modified nucleotide
  modified_base 71: mod_base = OTHER; note = 2'-O-methyl modified nucleotide
  modified_base 72: mod_base = OTHER; note = 2'-O-methyl modified nucleotide
  modified_base 73: mod_base = OTHER; note = 2'-O-methyl modified nucleotide
  modified_base 74: mod_base = OTHER; note = 2'-O-methyl modified nucleotide
  modified_base 75: mod_base = OTHER; note = 2'-O-methyl modified nucleotide
  modified_base 76: mod_base = OTHER; note = 2'-O-methyl modified nucleotide
  modified_base 77: mod_base = OTHER; note = 2'-O-methyl modified nucleotide
  modified_base 78: mod_base = OTHER; note = 2'-O-methyl modified nucleotide
  modified_base 79: mod_base = OTHER; note = 2'-O-methyl modified nucleotide
  modified_base 80: mod_base = OTHER; note = 2'-O-methyl modified nucleotide
  modified_base 81: mod_base = OTHER; note = 2'-O-methyl modified nucleotide
  modified_base 82: mod_base = OTHER; note = 2'-O-methyl modified nucleotide
  modified_base 83: mod_base = OTHER; note = 2'-O-methyl modified nucleotide
  modified_base 84: mod_base = OTHER; note = 2'-O-methyl modified nucleotide
  modified_base 85: mod_base = OTHER; note = 2'-O-methyl modified nucleotide
  modified_base 86: mod_base = OTHER; note = 2'-O-methyl modified nucleotide
  modified_base 87: mod_base = OTHER; note = 2'-O-methyl modified nucleotide
  modified_base 88: mod_base = OTHER; note = 2'-O-methyl modified nucleotide
  modified_base 89: mod_base = OTHER; note = 2'-O-methyl modified nucleotide
  modified_base 90: mod_base = OTHER; note = 2'-O-methyl modified nucleotide
  modified_base 91: mod_base = OTHER; note = 2'-O-methyl modified nucleotide
  modified_base 92: mod_base = OTHER; note = 2'-O-methyl modified nucleotide
  modified_base 93: mod_base = OTHER; note = 2'-O-methyl modified nucleotide
  modified_base 94: mod_base = OTHER; note = 2'-O-methyl modified nucleotide
  modified_base 95: mod_base = OTHER; note = 2'-O-methyl modified nucleotide
  modified_base 96: mod_base = OTHER; note = 2'-O-methyl modified nucleotide
  modified_base 97: mod_base = OTHER; note = 2'-O-methyl modified nucleotide with phosphorothioate linkage
  modified_base 98: mod_base = OTHER; note = 2'-O-methyl modified nucleotide with phosphorothioate linkage
  modified_base 99: mod_base = OTHER; note = 2'-O-methyl modified nucleotide with phosphorothioate linkage
  modified_base 100: mod_base = OTHER; note = 2'-O-methyl modified nucleotide

SEQ ID NO: 2011 - RNA, 100 nt, synthetic construct; identical to SEQ ID NO: 1011
  source 1..100: mol_type = other RNA
  modified_base 1: mod_base = OTHER; note = 2'-O-methyl modified nucleotide with phosphorothioate linkage
  modified_base 2: mod_base = OTHER; note = 2'-O-methyl modified nucleotide with phosphorothioate linkage
  modified_base 3: mod_base = OTHER; note = 2'-O-methyl modified nucleotide with phosphorothioate linkage
  modified_base 29: mod_base = OTHER; note = 2'-O-methyl modified nucleotide
  modified_base 30: mod_base = OTHER; note = 2'-O-methyl modified nucleotide
  modified_base 31: mod_base = OTHER; note = 2'-O-methyl modified nucleotide
  modified_base 32: mod_base = OTHER; note = 2'-O-methyl modified nucleotide
  modified_base 33: mod_base = OTHER; note = 2'-O-methyl modified nucleotide
  modified_base 34: mod_base = OTHER; note = 2'-O-methyl modified nucleotide
  modified_base 35: mod_base = OTHER; note = 2'-O-methyl modified nucleotide
  modified_base 36: mod_base = OTHER; note = 2'-O-methyl modified nucleotide
  modified_base 37: mod_base = OTHER; note = 2'-O-methyl modified nucleotide
  modified_base 38: mod_base = OTHER; note = 2'-O-methyl modified nucleotide
  modified_base 39: mod_base = OTHER; note = 2'-O-methyl modified nucleotide
  modified_base 40: mod_base = OTHER; note = 2'-O-methyl modified nucleotide
  modified_base 69: mod_base = OTHER; note = 2'-O-methyl modified nucleotide
  modified_base 70: mod_base = OTHER; note = 2'-O-methyl modified nucleotide
  modified_base 71: mod_base = OTHER; note = 2'-O-methyl modified nucleotide
  modified_base 72: mod_base = OTHER; note = 2'-O-methyl modified nucleotide
  modified_base 73: mod_base = OTHER; note = 2'-O-methyl modified nucleotide
  modified_base 74: mod_base = OTHER; note = 2'-O-methyl modified nucleotide
  modified_base 75: mod_base = OTHER; note = 2'-O-methyl modified nucleotide
  modified_base 76: mod_base = OTHER; note = 2'-O-methyl modified nucleotide
  modified_base 77: mod_base = OTHER; note = 2'-O-methyl modified nucleotide
  modified_base 78: mod_base = OTHER; note = 2'-O-methyl modified nucleotide
  modified_base 79: mod_base = OTHER; note = 2'-O-methyl modified nucleotide
  modified_base 80: mod_base = OTHER; note = 2'-O-methyl modified nucleotide
  modified_base 81: mod_base = OTHER; note = 2'-O-methyl modified nucleotide
  modified_base 82: mod_base = OTHER; note = 2'-O-methyl modified nucleotide
  modified_base 83: mod_base = OTHER; note = 2'-O-methyl modified nucleotide
  modified_base 84: mod_base = OTHER; note = 2'-O-methyl modified nucleotide
  modified_base 85: mod_base = OTHER; note = 2'-O-methyl modified nucleotide
  modified_base 86: mod_base = OTHER; note = 2'-O-methyl modified nucleotide
  modified_base 87: mod_base = OTHER; note = 2'-O-methyl modified nucleotide
  modified_base 88: mod_base = OTHER; note = 2'-O-methyl modified nucleotide
  modified_base 89: mod_base = OTHER; note = 2'-O-methyl modified nucleotide
  modified_base 90: mod_base = OTHER; note = 2'-O-methyl modified nucleotide
  modified_base 91: mod_base = OTHER; note = 2'-O-methyl modified nucleotide
  modified_base 92: mod_base = OTHER; note = 2'-O-methyl modified nucleotide
  modified_base 93: mod_base = OTHER; note = 2'-O-methyl modified nucleotide
  modified_base 94: mod_base = OTHER; note = 2'-O-methyl modified nucleotide
  modified_base 95: mod_base = OTHER; note = 2'-O-methyl modified nucleotide
  modified_base 96: mod_base = OTHER; note = 2'-O-methyl modified nucleotide
  modified_base 97: mod_base = OTHER; note = 2'-O-methyl modified nucleotide with phosphorothioate linkage
  modified_base 98: mod_base = OTHER; note = 2'-O-methyl modified nucleotide with phosphorothioate linkage
  modified_base 99: mod_base = OTHER; note = 2'-O-methyl modified nucleotide with phosphorothioate linkage
  modified_base 100: mod_base = OTHER; note = 2'-O-methyl modified nucleotide

SEQ ID NO: 2012 - RNA, 100 nt, synthetic construct; identical to SEQ ID NO: 1012
  source 1..100: mol_type = other RNA
  modified_base 1: mod_base = OTHER; note = 2'-O-methyl modified nucleotide with phosphorothioate linkage
  modified_base 2: mod_base = OTHER; note = 2'-O-methyl modified nucleotide with phosphorothioate linkage
  modified_base 3: mod_base = OTHER; note = 2'-O-methyl modified nucleotide with phosphorothioate linkage
  modified_base 29: mod_base = OTHER; note = 2'-O-methyl modified nucleotide
  modified_base 30: mod_base = OTHER; note = 2'-O-methyl modified nucleotide
  modified_base 31: mod_base = OTHER; note = 2'-O-methyl modified nucleotide
  modified_base 32: mod_base = OTHER; note = 2'-O-methyl modified nucleotide
  modified_base 33: mod_base = OTHER; note = 2'-O-methyl modified nucleotide
  modified_base 34: mod_base = OTHER; note = 2'-O-methyl modified nucleotide
  modified_base 35: mod_base = OTHER; note = 2'-O-methyl modified nucleotide
  modified_base 36: mod_base = OTHER; note = 2'-O-methyl modified nucleotide
  modified_base 37: mod_base = OTHER; note = 2'-O-methyl modified nucleotide
  modified_base 38: mod_base = OTHER; note = 2'-O-methyl modified nucleotide
  modified_base 39: mod_base = OTHER; note = 2'-O-methyl modified nucleotide
  modified_base 40: mod_base = OTHER; note = 2'-O-methyl modified nucleotide
  modified_base 69: mod_base = OTHER; note = 2'-O-methyl modified nucleotide
  modified_base 70: mod_base = OTHER; note = 2'-O-methyl modified nucleotide
  modified_base 71: mod_base = OTHER; note = 2'-O-methyl modified nucleotide
  modified_base 72: mod_base = OTHER; note = 2'-O-methyl modified nucleotide
  modified_base 73: mod_base = OTHER; note = 2'-O-methyl modified nucleotide
  modified_base 74: mod_base = OTHER; note = 2'-O-methyl modified nucleotide
  modified_base 75: mod_base = OTHER; note = 2'-O-methyl modified nucleotide
  modified_base 76: mod_base = OTHER; note = 2'-O-methyl modified nucleotide
  modified_base 77: mod_base = OTHER; note = 2'-O-methyl modified nucleotide
  modified_base 78: mod_base = OTHER; note = 2'-O-methyl modified nucleotide
  modified_base 79: mod_base = OTHER; note = 2'-O-methyl modified nucleotide
  modified_base 80: mod_base = OTHER; note = 2'-O-methyl modified nucleotide
  modified_base 81: mod_base = OTHER; note = 2'-O-methyl modified nucleotide
  modified_base 82: mod_base = OTHER; note = 2'-O-methyl modified nucleotide
  modified_base 83: mod_base = OTHER; note = 2'-O-methyl modified nucleotide
  modified_base 84: mod_base = OTHER; note = 2'-O-methyl modified nucleotide
  modified_base 85: mod_base = OTHER; note = 2'-O-methyl modified nucleotide
  modified_base 86: mod_base = OTHER; note = 2'-O-methyl modified nucleotide
  modified_base 87: mod_base = OTHER; note = 2'-O-methyl modified nucleotide
  modified_base 88: mod_base = OTHER; note = 2'-O-methyl modified nucleotide
  modified_base 89: mod_base = OTHER; note = 2'-O-methyl modified nucleotide
  modified_base 90: mod_base = OTHER; note = 2'-O-methyl modified nucleotide
  modified_base 91: mod_base = OTHER; note = 2'-O-methyl modified nucleotide
  modified_base 92: mod_base = OTHER; note = 2'-O-methyl modified nucleotide
  modified_base 93: mod_base = OTHER; note = 2'-O-methyl modified nucleotide
  modified_base 94: mod_base = OTHER; note = 2'-O-methyl modified nucleotide
  modified_base 95: mod_base = OTHER; note = 2'-O-methyl modified nucleotide
  modified_base 96: mod_base = OTHER; note = 2'-O-methyl modified nucleotide
  modified_base 97: mod_base = OTHER; note = 2'-O-methyl modified nucleotide with phosphorothioate linkage
  modified_base 98: mod_base = OTHER; note = 2'-O-methyl modified nucleotide with phosphorothioate linkage
  modified_base 99: mod_base = OTHER; note = 2'-O-methyl modified nucleotide with phosphorothioate linkage
  modified_base 100: mod_base = OTHER; note = 2'-O-methyl modified nucleotide

SEQ ID NO: 2013 - RNA, 100 nt, synthetic construct; identical to SEQ ID NO: 1013
  source 1..100: mol_type = other RNA
  modified_base 1: mod_base = OTHER; note = 2'-O-methyl modified nucleotide with phosphorothioate linkage
  modified_base 2: mod_base = OTHER; note = 2'-O-methyl modified nucleotide with phosphorothioate linkage
  modified_base 3: mod_base = OTHER; note = 2'-O-methyl modified nucleotide with phosphorothioate linkage
  modified_base 29: mod_base = OTHER; note = 2'-O-methyl modified nucleotide
  modified_base 30: mod_base = OTHER; note = 2'-O-methyl modified nucleotide
  modified_base 31: mod_base = OTHER; note = 2'-O-methyl modified nucleotide
  modified_base 32: mod_base = OTHER; note = 2'-O-methyl modified nucleotide
  modified_base 33: mod_base = OTHER; note = 2'-O-methyl modified nucleotide
  modified_base 34: mod_base = OTHER; note = 2'-O-methyl modified nucleotide
  modified_base 35: mod_base = OTHER; note = 2'-O-methyl modified nucleotide
  modified_base 36: mod_base = OTHER; note = 2'-O-methyl modified nucleotide
  modified_base 37: mod_base = OTHER; note = 2'-O-methyl modified nucleotide
  modified_base 38: mod_base = OTHER; note = 2'-O-methyl modified nucleotide
  modified_base 39: mod_base = OTHER; note = 2'-O-methyl modified nucleotide
  modified_base 40: mod_base = OTHER; note = 2'-O-methyl modified nucleotide
  modified_base 69: mod_base = OTHER; note = 2'-O-methyl modified nucleotide
  modified_base 70: mod_base = OTHER; note = 2'-O-methyl modified nucleotide
  modified_base 71: mod_base = OTHER; note = 2'-O-methyl modified nucleotide
  modified_base 72: mod_base = OTHER; note = 2'-O-methyl modified nucleotide
  modified_base 73: mod_base = OTHER; note = 2'-O-methyl modified nucleotide
  modified_base 74: mod_base = OTHER; note = 2'-O-methyl modified nucleotide
  modified_base 75: mod_base = OTHER; note = 2'-O-methyl modified nucleotide
  modified_base 76: mod_base = OTHER; note = 2'-O-methyl modified nucleotide
  modified_base 77: mod_base = OTHER; note = 2'-O-methyl modified nucleotide
  modified_base 78: mod_base = OTHER; note = 2'-O-methyl modified nucleotide
  modified_base 79: mod_base = OTHER; note = 2'-O-methyl modified nucleotide
  modified_base 80: mod_base = OTHER; note = 2'-O-methyl modified nucleotide
  modified_base 81: mod_base = OTHER; note = 2'-O-methyl modified nucleotide
  modified_base 82: mod_base = OTHER; note = 2'-O-methyl modified nucleotide
  modified_base 83: mod_base = OTHER; note = 2'-O-methyl modified nucleotide
  modified_base 84: mod_base = OTHER; note = 2'-O-methyl modified nucleotide
  modified_base 85: mod_base = OTHER; note = 2'-O-methyl modified nucleotide
  modified_base 86: mod_base = OTHER; note = 2'-O-methyl modified nucleotide
  modified_base 87: mod_base = OTHER; note = 2'-O-methyl modified nucleotide
  modified_base 88: mod_base = OTHER; note = 2'-O-methyl modified nucleotide
  modified_base 89: mod_base = OTHER; note = 2'-O-methyl modified nucleotide
  modified_base 90: mod_base = OTHER; note = 2'-O-methyl modified nucleotide
  modified_base 91: mod_base = OTHER; note = 2'-O-methyl modified nucleotide
  modified_base 92: mod_base = OTHER; note = 2'-O-methyl modified nucleotide
  modified_base 93: mod_base = OTHER; note = 2'-O-methyl modified nucleotide
  modified_base 94: mod_base = OTHER; note = 2'-O-methyl modified nucleotide
  modified_base 95: mod_base = OTHER; note = 2'-O-methyl modified nucleotide
  modified_base 96: mod_base = OTHER; note = 2'-O-methyl modified nucleotide
  modified_base 97: mod_base = OTHER; note = 2'-O-methyl modified nucleotide with phosphorothioate linkage
  modified_base 98: mod_base = OTHER; note = 2'-O-methyl modified nucleotide with phosphorothioate linkage
  modified_base 99: mod_base = OTHER; note = 2'-O-methyl modified nucleotide with phosphorothioate linkage
  modified_base 100: mod_base = OTHER; note = 2'-O-methyl modified nucleotide

SEQ ID NO: 2014 - RNA, 100 nt, synthetic construct; identical to SEQ ID NO: 1014
  source 1..100: mol_type = other RNA
  modified_base 1: mod_base = OTHER; note = 2'-O-methyl modified nucleotide with phosphorothioate linkage
  modified_base 2: mod_base = OTHER; note = 2'-O-methyl modified nucleotide with phosphorothioate linkage
  modified_base 3: mod_base = OTHER; note = 2'-O-methyl modified nucleotide with phosphorothioate linkage
  modified_base 29: mod_base = OTHER; note = 2'-O-methyl modified nucleotide
  modified_base 30: mod_base = OTHER; note = 2'-O-methyl modified nucleotide
  modified_base 31: mod_base = OTHER; note = 2'-O-methyl modified nucleotide
  modified_base 32: mod_base = OTHER; note = 2'-O-methyl modified nucleotide
  modified_base 33: mod_base = OTHER; note = 2'-O-methyl modified nucleotide
  modified_base 34: mod_base = OTHER; note = 2'-O-methyl modified nucleotide
  modified_base 35: mod_base = OTHER; note = 2'-O-methyl modified nucleotide
  modified_base 36: mod_base = OTHER; note = 2'-O-methyl modified nucleotide
  modified_base 37: mod_base = OTHER; note = 2'-O-methyl modified nucleotide
  modified_base 38: mod_base = OTHER; note = 2'-O-methyl modified nucleotide
  modified_base 39: mod_base = OTHER; note = 2'-O-methyl modified nucleotide
  modified_base 40: mod_base = OTHER; note = 2'-O-methyl modified nucleotide
  modified_base 69: mod_base = OTHER; note = 2'-O-methyl modified nucleotide
  modified_base 70: mod_base = OTHER; note = 2'-O-methyl modified nucleotide
  modified_base 71: mod_base = OTHER; note = 2'-O-methyl modified nucleotide
  modified_base 72: mod_base = OTHER; note = 2'-O-methyl modified nucleotide
  modified_base 73: mod_base = OTHER; note = 2'-O-methyl modified nucleotide
  modified_base 74: mod_base = OTHER; note = 2'-O-methyl modified nucleotide
  modified_base 75: mod_base = OTHER; note = 2'-O-methyl modified nucleotide
  modified_base 76: mod_base = OTHER; note = 2'-O-methyl modified nucleotide
  modified_base 77: mod_base = OTHER; note = 2'-O-methyl modified nucleotide
  modified_base 78: mod_base = OTHER; note = 2'-O-methyl modified nucleotide
  modified_base 79: mod_base = OTHER; note = 2'-O-methyl modified nucleotide
  modified_base 80: mod_base = OTHER; note = 2'-O-methyl modified nucleotide
  modified_base 81: mod_base = OTHER; note = 2'-O-methyl modified nucleotide
  modified_base 82: mod_base = OTHER; note = 2'-O-methyl modified nucleotide
  modified_base 83: mod_base = OTHER; note = 2'-O-methyl modified nucleotide
  modified_base 84: mod_base = OTHER; note = 2'-O-methyl modified nucleotide
  modified_base 85: mod_base = OTHER; note = 2'-O-methyl modified nucleotide
  modified_base 86: mod_base = OTHER; note = 2'-O-methyl modified nucleotide
  modified_base 87: mod_base = OTHER; note = 2'-O-methyl modified nucleotide
  modified_base 88: mod_base = OTHER; note = 2'-O-methyl modified nucleotide
  modified_base 89: mod_base = OTHER; note = 2'-O-methyl modified nucleotide
  modified_base 90: mod_base = OTHER; note = 2'-O-methyl modified nucleotide
  modified_base 91: mod_base = OTHER; note = 2'-O-methyl modified nucleotide
  modified_base 92: mod_base = OTHER; note = 2'-O-methyl modified nucleotide
  modified_base 93: mod_base = OTHER; note = 2'-O-methyl modified nucleotide
  modified_base 94: mod_base = OTHER; note = 2'-O-methyl modified nucleotide
  modified_base 95: mod_base = OTHER; note = 2'-O-methyl modified nucleotide
  modified_base 96: mod_base = OTHER; note = 2'-O-methyl modified nucleotide
  modified_base 97: mod_base = OTHER; note = 2'-O-methyl modified nucleotide with phosphorothioate linkage
  modified_base 98: mod_base = OTHER; note = 2'-O-methyl modified nucleotide with phosphorothioate linkage
  modified_base 99: mod_base = OTHER; note = 2'-O-methyl modified nucleotide with phosphorothioate linkage
  modified_base 100: mod_base = OTHER; note = 2'-O-methyl modified nucleotide

SEQ ID NO: 2015 - RNA, 100 nt, synthetic construct; identical to SEQ ID NO: 1015
  source 1..100: mol_type = other RNA
  modified_base 1: mod_base = OTHER; note = 2'-O-methyl modified nucleotide with phosphorothioate linkage
  modified_base 2: mod_base = OTHER; note = 2'-O-methyl modified nucleotide with phosphorothioate linkage
  modified_base 3: mod_base = OTHER; note = 2'-O-methyl modified nucleotide with phosphorothioate linkage
  modified_base 29: mod_base = OTHER; note = 2'-O-methyl modified nucleotide
  modified_base 30: mod_base = OTHER; note = 2'-O-methyl modified nucleotide
  modified_base 31: mod_base = OTHER; note = 2'-O-methyl modified nucleotide
  modified_base 32: mod_base = OTHER; note = 2'-O-methyl modified nucleotide
  modified_base 33: mod_base = OTHER; note = 2'-O-methyl modified nucleotide
  modified_base 34: mod_base = OTHER; note = 2'-O-methyl modified nucleotide
  modified_base 35: mod_base = OTHER; note = 2'-O-methyl modified nucleotide
  modified_base 36: mod_base = OTHER; note = 2'-O-methyl modified nucleotide
  modified_base 37: mod_base = OTHER; note = 2'-O-methyl modified nucleotide
  modified_base 38: mod_base = OTHER; note = 2'-O-methyl modified nucleotide
  modified_base 39: mod_base = OTHER; note = 2'-O-methyl modified nucleotide
  modified_base 40: mod_base = OTHER; note = 2'-O-methyl modified nucleotide
  modified_base 69: mod_base = OTHER; note = 2'-O-methyl modified nucleotide
  modified_base 70: mod_base = OTHER; note = 2'-O-methyl modified nucleotide
  modified_base 71: mod_base = OTHER; note = 2'-O-methyl modified nucleotide
  modified_base 72: mod_base = OTHER; note = 2'-O-methyl modified nucleotide
  modified_base 73: mod_base = OTHER; note = 2'-O-methyl modified nucleotide
  modified_base 74: mod_base = OTHER; note = 2'-O-methyl modified nucleotide
  modified_base 75: mod_base = OTHER; note = 2'-O-methyl modified nucleotide
  modified_base 76: mod_base = OTHER; note = 2'-O-methyl modified nucleotide
  modified_base 77: mod_base = OTHER; note = 2'-O-methyl modified nucleotide
  modified_base 78: mod_base = OTHER; note = 2'-O-methyl modified nucleotide
  modified_base 79: mod_base = OTHER; note = 2'-O-methyl modified nucleotide
  modified_base 80: mod_base = OTHER; note = 2'-O-methyl modified nucleotide
  modified_base 81: mod_base = OTHER; note = 2'-O-methyl modified nucleotide
  modified_base 82: mod_base = OTHER; note = 2'-O-methyl modified nucleotide
  modified_base 83: mod_base = OTHER; note = 2'-O-methyl modified nucleotide
  modified_base 84: mod_base = OTHER; note = 2'-O-methyl modified nucleotide
  modified_base 85: mod_base = OTHER; note = 2'-O-methyl modified nucleotide
  modified_base 86: mod_base = OTHER; note = 2'-O-methyl modified nucleotide
  modified_base 87: mod_base = OTHER; note = 2'-O-methyl modified nucleotide
  modified_base 88: mod_base = OTHER; note = 2'-O-methyl modified nucleotide
  modified_base 89: mod_base = OTHER; note = 2'-O-methyl modified nucleotide
  modified_base 90: mod_base = OTHER; note = 2'-O-methyl modified nucleotide
  modified_base 91: mod_base = OTHER; note = 2'-O-methyl modified nucleotide
  modified_base 92: mod_base = OTHER; note = 2'-O-methyl modified nucleotide
  modified_base 93: mod_base = OTHER; note = 2'-O-methyl modified nucleotide
  modified_base 94: mod_base = OTHER; note = 2'-O-methyl modified nucleotide
  modified_base 95: mod_base = OTHER; note = 2'-O-methyl modified nucleotide
  modified_base 96: mod_base = OTHER; note = 2'-O-methyl modified nucleotide
  modified_base 97: mod_base = OTHER; note = 2'-O-methyl modified nucleotide with phosphorothioate linkage
  modified_base 98: mod_base = OTHER; note = 2'-O-methyl modified nucleotide with phosphorothioate linkage
  modified_base 99: mod_base = OTHER; note = 2'-O-methyl modified nucleotide with phosphorothioate linkage
  modified_base 100: mod_base = OTHER; note = 2'-O-methyl modified nucleotide

SEQ ID NO: 2016 - RNA, 100 nt, synthetic construct; identical to SEQ ID NO: 1016
  source 1..100: mol_type = other RNA
  modified_base 1: mod_base = OTHER; note = 2'-O-methyl modified nucleotide with phosphorothioate linkage
  modified_base 2: mod_base = OTHER; note = 2'-O-methyl modified nucleotide with phosphorothioate linkage
  modified_base 3: mod_base = OTHER; note = 2'-O-methyl modified nucleotide with phosphorothioate linkage
  modified_base 29: mod_base = OTHER; note = 2'-O-methyl modified nucleotide
  modified_base 30: mod_base = OTHER; note = 2'-O-methyl modified nucleotide
  modified_base 31: mod_base = OTHER; note = 2'-O-methyl modified nucleotide
  modified_base 32: mod_base = OTHER; note = 2'-O-methyl modified nucleotide
  modified_base 33: mod_base = OTHER; note = 2'-O-methyl modified nucleotide
  modified_base 34: mod_base = OTHER; note = 2'-O-methyl modified nucleotide
  modified_base 35: mod_base = OTHER; note = 2'-O-methyl modified nucleotide
  modified_base 36: mod_base = OTHER; note = 2'-O-methyl modified nucleotide
  modified_base 37: mod_base = OTHER; note = 2'-O-methyl modified nucleotide
  modified_base 38: mod_base = OTHER; note = 2'-O-methyl modified nucleotide
  modified_base 39: mod_base = OTHER; note = 2'-O-methyl modified nucleotide
  modified_base 40: mod_base = OTHER; note = 2'-O-methyl modified nucleotide
  modified_base 69: mod_base = OTHER; note = 2'-O-methyl modified nucleotide
  modified_base 70: mod_base = OTHER; note = 2'-O-methyl modified nucleotide
  modified_base 71: mod_base = OTHER; note = 2'-O-methyl modified nucleotide
  modified_base 72: mod_base = OTHER; note = 2'-O-methyl modified nucleotide
  modified_base 73: mod_base = OTHER; note = 2'-O-methyl modified nucleotide
  modified_base 74: mod_base = OTHER; note = 2'-O-methyl modified nucleotide
  modified_base 75: mod_base = OTHER; note = 2'-O-methyl modified nucleotide
  modified_base 76: mod_base = OTHER; note = 2'-O-methyl modified nucleotide
  modified_base 77: mod_base = OTHER; note = 2'-O-methyl modified nucleotide
  modified_base 78: mod_base = OTHER; note = 2'-O-methyl modified nucleotide
  modified_base 79: mod_base = OTHER; note = 2'-O-methyl modified nucleotide
  modified_base 80: mod_base = OTHER; note = 2'-O-methyl modified nucleotide
  modified_base 81: mod_base = OTHER; note = 2'-O-methyl modified nucleotide
  modified_base 82: mod_base = OTHER; note = 2'-O-methyl modified nucleotide
  modified_base 83: mod_base = OTHER; note = 2'-O-methyl modified nucleotide
  modified_base 84: mod_base = OTHER; note = 2'-O-methyl modified nucleotide
  modified_base 85: mod_base = OTHER; note = 2'-O-methyl modified nucleotide
  modified_base 86: mod_base = OTHER; note = 2'-O-methyl modified nucleotide
  modified_base 87: mod_base = OTHER; note = 2'-O-methyl modified nucleotide
  modified_base 88: mod_base = OTHER; note = 2'-O-methyl modified nucleotide
  modified_base 89: mod_base = OTHER; note = 2'-O-methyl modified nucleotide
  modified_base 90: mod_base = OTHER; note = 2'-O-methyl modified nucleotide
  modified_base 91: mod_base = OTHER; note = 2'-O-methyl modified nucleotide
  modified_base 92: mod_base = OTHER; note = 2'-O-methyl modified nucleotide
  modified_base 93: mod_base = OTHER; note = 2'-O-methyl modified nucleotide
  modified_base 94: mod_base = OTHER; note = 2'-O-methyl modified nucleotide
  modified_base 95: mod_base = OTHER; note = 2'-O-methyl modified nucleotide
  modified_base 96: mod_base = OTHER; note = 2'-O-methyl modified nucleotide
  modified_base 97: mod_base = OTHER; note = 2'-O-methyl modified nucleotide with phosphorothioate linkage
  modified_base 98: mod_base = OTHER; note = 2'-O-methyl modified nucleotide with phosphorothioate linkage
  modified_base 99: mod_base = OTHER; note = 2'-O-methyl modified nucleotide with phosphorothioate linkage
  modified_base 100: mod_base = OTHER; note = 2'-O-methyl modified nucleotide

SEQ ID NO: 2017 - RNA, 100 nt, synthetic construct; identical to SEQ ID NO: 1017
  source 1..100: mol_type = other RNA
  modified_base 1: mod_base = OTHER; note = 2'-O-methyl modified nucleotide with phosphorothioate linkage
  modified_base 2: mod_base = OTHER; note = 2'-O-methyl modified nucleotide with phosphorothioate linkage
  modified_base 3: mod_base = OTHER; note = 2'-O-methyl modified nucleotide with phosphorothioate linkage
  modified_base 29: mod_base = OTHER; note = 2'-O-methyl modified nucleotide
  modified_base 30: mod_base = OTHER; note = 2'-O-methyl modified nucleotide
  modified_base 31: mod_base = OTHER; note = 2'-O-methyl modified nucleotide
  modified_base 32: mod_base = OTHER; note = 2'-O-methyl modified nucleotide
  modified_base 33: mod_base = OTHER; note = 2'-O-methyl modified nucleotide
  modified_base 34: mod_base = OTHER; note = 2'-O-methyl modified nucleotide
  modified_base 35: mod_base = OTHER; note = 2'-O-methyl modified nucleotide
  modified_base 36: mod_base = OTHER; note = 2'-O-methyl modified nucleotide
  modified_base 37: mod_base = OTHER; note = 2'-O-methyl modified nucleotide
  modified_base 38: mod_base = OTHER; note = 2'-O-methyl modified nucleotide
  modified_base 39: mod_base = OTHER; note = 2'-O-methyl modified nucleotide
  modified_base 40: mod_base = OTHER; note = 2'-O-methyl modified nucleotide
  modified_base 69: mod_base = OTHER; note = 2'-O-methyl modified nucleotide
  modified_base 70: mod_base = OTHER; note = 2'-O-methyl modified nucleotide
  modified_base 71: mod_base = OTHER; note = 2'-O-methyl modified nucleotide
  modified_base 72: mod_base = OTHER; note = 2'-O-methyl modified nucleotide
  modified_base 73: mod_base = OTHER; note = 2'-O-methyl modified nucleotide
  modified_base 74: mod_base = OTHER; note = 2'-O-methyl modified nucleotide
  modified_base 75: mod_base = OTHER; note = 2'-O-methyl modified nucleotide
  modified_base 76: mod_base = OTHER; note = 2'-O-methyl modified nucleotide
  modified_base 77: mod_base = OTHER; note = 2'-O-methyl modified nucleotide
  modified_base 78: mod_base = OTHER; note = 2'-O-methyl modified nucleotide
  modified_base 79: mod_base = OTHER; note = 2'-O-methyl modified nucleotide
  modified_base 80: mod_base = OTHER; note = 2'-O-methyl modified nucleotide
  modified_base 81: mod_base = OTHER; note = 2'-O-methyl modified nucleotide
  modified_base 82: mod_base = OTHER; note = 2'-O-methyl modified nucleotide
  modified_base 83: mod_base = OTHER; note = 2'-O-methyl modified nucleotide
  modified_base 84: mod_base = OTHER; note = 2'-O-methyl modified nucleotide
  modified_base 85: mod_base = OTHER; note = 2'-O-methyl modified nucleotide
  modified_base 86: mod_base = OTHER; note = 2'-O-methyl modified nucleotide
  modified_base 87: mod_base = OTHER; note = 2'-O-methyl modified nucleotide
  modified_base 88: mod_base = OTHER; note = 2'-O-methyl modified nucleotide
  modified_base 89: mod_base = OTHER; note = 2'-O-methyl modified nucleotide
  modified_base 90: mod_base = OTHER; note = 2'-O-methyl modified nucleotide
  modified_base 91: mod_base = OTHER; note = 2'-O-methyl modified nucleotide
  modified_base 92: mod_base = OTHER; note = 2'-O-methyl modified nucleotide
  modified_base 93: mod_base = OTHER; note = 2'-O-methyl modified nucleotide
  modified_base 94: mod_base = OTHER; note = 2'-O-methyl modified nucleotide
  modified_base 95: mod_base = OTHER; note = 2'-O-methyl modified nucleotide
  modified_base 96: mod_base = OTHER; note = 2'-O-methyl modified nucleotide
  modified_base 97: mod_base = OTHER; note = 2'-O-methyl modified nucleotide with phosphorothioate linkage
  modified_base 98: mod_base = OTHER; note = 2'-O-methyl modified nucleotide with phosphorothioate linkage
  modified_base 99: mod_base = OTHER; note = 2'-O-methyl modified nucleotide with phosphorothioate linkage
  modified_base 100: mod_base = OTHER; note = 2'-O-methyl modified nucleotide

SEQ ID NO: 2018 - RNA, 100 nt, synthetic construct; identical to SEQ ID NO: 1018
  source 1..100: mol_type = other RNA
  modified_base 1: mod_base = OTHER; note = 2'-O-methyl modified nucleotide with phosphorothioate linkage
  modified_base 2: mod_base = OTHER; note = 2'-O-methyl modified nucleotide with phosphorothioate linkage
  modified_base 3: mod_base = OTHER; note = 2'-O-methyl modified nucleotide with phosphorothioate linkage
  modified_base 29: mod_base = OTHER; note = 2'-O-methyl modified nucleotide
  modified_base 30: mod_base = OTHER; note = 2'-O-methyl modified nucleotide
  modified_base 31: mod_base = OTHER; note = 2'-O-methyl modified nucleotide
  modified_base 32: mod_base = OTHER; note = 2'-O-methyl modified nucleotide
  modified_base 33: mod_base = OTHER; note = 2'-O-methyl modified nucleotide
  modified_base 34: mod_base = OTHER; note = 2'-O-methyl modified nucleotide
  modified_base 35: mod_base = OTHER; note = 2'-O-methyl modified nucleotide
  modified_base 36: mod_base = OTHER; note = 2'-O-methyl modified nucleotide
  modified_base 37: mod_base = OTHER; note = 2'-O-methyl modified nucleotide
  modified_base 38: mod_base = OTHER; note = 2'-O-methyl modified nucleotide
  modified_base 39: mod_base = OTHER; note = 2'-O-methyl modified nucleotide
  modified_base 40: mod_base = OTHER; note = 2'-O-methyl modified nucleotide
  modified_base 69: mod_base = OTHER; note = 2'-O-methyl modified nucleotide
  modified_base 70: mod_base = OTHER; note = 2'-O-methyl modified nucleotide
  modified_base 71: mod_base = OTHER; note = 2'-O-methyl modified nucleotide
  modified_base 72: mod_base = OTHER; note = 2'-O-methyl modified nucleotide
  modified_base 73: mod_base = OTHER; note = 2'-O-methyl modified nucleotide
  modified_base 74: mod_base = OTHER; note = 2'-O-methyl modified nucleotide
  modified_base 75: mod_base = OTHER; note = 2'-O-methyl modified nucleotide
  modified_base 76: mod_base = OTHER; note = 2'-O-methyl modified nucleotide
  modified_base 77: mod_base = OTHER; note = 2'-O-methyl modified nucleotide
  modified_base 78: mod_base = OTHER; note = 2'-O-methyl modified nucleotide
  modified_base 79: mod_base = OTHER; note = 2'-O-methyl modified nucleotide
  modified_base 80: mod_base = OTHER; note = 2'-O-methyl modified nucleotide
  modified_base 81: mod_base = OTHER; note = 2'-O-methyl modified nucleotide
  modified_base 82: mod_base = OTHER; note = 2'-O-methyl modified nucleotide
  modified_base 83: mod_base = OTHER; note = 2'-O-methyl modified nucleotide
  modified_base 84: mod_base = OTHER; note = 2'-O-methyl modified nucleotide
  modified_base 85: mod_base = OTHER; note = 2'-O-methyl modified nucleotide
  modified_base 86: mod_base = OTHER; note = 2'-O-methyl modified nucleotide
  modified_base 87: mod_base = OTHER; note = 2'-O-methyl modified nucleotide
  modified_base 88: mod_base = OTHER; note = 2'-O-methyl modified nucleotide
  modified_base 89: mod_base = OTHER; note = 2'-O-methyl modified nucleotide
  modified_base 90: mod_base = OTHER; note = 2'-O-methyl modified nucleotide
  modified_base 91: mod_base = OTHER; note = 2'-O-methyl modified nucleotide
  modified_base 92: mod_base = OTHER; note = 2'-O-methyl modified nucleotide
  modified_base 93: mod_base = OTHER; note = 2'-O-methyl modified nucleotide
  modified_base 94: mod_base = OTHER; note = 2'-O-methyl modified nucleotide
  modified_base 95: mod_base = OTHER; note = 2'-O-methyl modified nucleotide
  modified_base 96: mod_base = OTHER; note = 2'-O-methyl modified nucleotide
  modified_base 97: mod_base = OTHER; note = 2'-O-methyl modified nucleotide with phosphorothioate linkage
  modified_base 98: mod_base = OTHER; note = 2'-O-methyl modified nucleotide with phosphorothioate linkage
  modified_base 99: mod_base = OTHER; note = 2'-O-methyl modified nucleotide with phosphorothioate linkage
  modified_base 100: mod_base = OTHER; note = 2'-O-methyl modified nucleotide

SEQ ID NO: 2019 - RNA, 100 nt, synthetic construct; identical to SEQ ID NO: 1019
  source 1..100: mol_type = other RNA
  modified_base 1: mod_base = OTHER; note = 2'-O-methyl modified nucleotide with phosphorothioate linkage
  modified_base 2: mod_base = OTHER; note = 2'-O-methyl modified nucleotide with phosphorothioate linkage
  modified_base 3: mod_base = OTHER; note = 2'-O-methyl modified nucleotide with phosphorothioate linkage
  modified_base 29: mod_base = OTHER; note = 2'-O-methyl modified nucleotide
  modified_base 30: mod_base = OTHER; note = 2'-O-methyl modified nucleotide
  modified_base 31: mod_base = OTHER; note = 2'-O-methyl modified nucleotide
  modified_base 32: mod_base = OTHER; note = 2'-O-methyl modified nucleotide
  modified_base 33: mod_base = OTHER; note = 2'-O-methyl modified nucleotide
  modified_base 34: mod_base = OTHER; note = 2'-O-methyl modified nucleotide
  modified_base 35: mod_base = OTHER; note = 2'-O-methyl modified nucleotide
  modified_base 36: mod_base = OTHER; note = 2'-O-methyl modified nucleotide
  modified_base 37: mod_base = OTHER; note = 2'-O-methyl modified nucleotide
  modified_base 38: mod_base = OTHER; note = 2'-O-methyl modified nucleotide
  modified_base 39: mod_base = OTHER; note = 2'-O-methyl modified nucleotide
  modified_base 40: mod_base = OTHER; note = 2'-O-methyl modified nucleotide
  modified_base 69: mod_base = OTHER; note = 2'-O-methyl modified nucleotide
  modified_base 70: mod_base = OTHER; note = 2'-O-methyl modified nucleotide
  modified_base 71: mod_base = OTHER; note = 2'-O-methyl modified nucleotide
  modified_base 72: mod_base = OTHER; note = 2'-O-methyl modified nucleotide
  modified_base 73: mod_base = OTHER; note = 2'-O-methyl modified nucleotide
  modified_base 74: mod_base = OTHER; note = 2'-O-methyl modified nucleotide
  modified_base 75: mod_base = OTHER; note = 2'-O-methyl modified nucleotide
  modified_base 76: mod_base = OTHER; note = 2'-O-methyl modified nucleotide
  modified_base 77: mod_base = OTHER; note = 2'-O-methyl modified nucleotide
  modified_base 78: mod_base = OTHER; note = 2'-O-methyl modified nucleotide
  modified_base 79: mod_base = OTHER; note = 2'-O-methyl modified nucleotide
  modified_base 80: mod_base = OTHER; note = 2'-O-methyl modified nucleotide
  modified_base 81: mod_base = OTHER; note = 2'-O-methyl modified nucleotide
  modified_base 82: mod_base = OTHER; note = 2'-O-methyl modified nucleotide
  modified_base 83: mod_base = OTHER; note = 2'-O-methyl modified nucleotide
  modified_base 84: mod_base = OTHER; note = 2'-O-methyl modified nucleotide
  modified_base 85: mod_base = OTHER; note = 2'-O-methyl modified nucleotide
  modified_base 86: mod_base = OTHER; note = 2'-O-methyl modified nucleotide
  modified_base 87: mod_base = OTHER; note = 2'-O-methyl modified nucleotide
  modified_base 88: mod_base = OTHER; note = 2'-O-methyl modified nucleotide
  modified_base 89: mod_base = OTHER; note = 2'-O-methyl modified nucleotide
  modified_base 90: mod_base = OTHER; note = 2'-O-methyl modified nucleotide
  modified_base 91: mod_base = OTHER; note = 2'-O-methyl modified nucleotide
  modified_base 92: mod_base = OTHER; note = 2'-O-methyl modified nucleotide
  modified_base 93: mod_base = OTHER; note = 2'-O-methyl modified nucleotide
  modified_base 94: mod_base = OTHER; note = 2'-O-methyl modified nucleotide
  modified_base 95: mod_base = OTHER; note = 2'-O-methyl modified nucleotide
  modified_base 96: mod_base = OTHER; note = 2'-O-methyl modified nucleotide
  modified_base 97: mod_base = OTHER; note = 2'-O-methyl modified nucleotide with phosphorothioate linkage
  modified_base 98: mod_base = OTHER; note = 2'-O-methyl modified nucleotide with phosphorothioate linkage
  modified_base 99: mod_base = OTHER; note = 2'-O-methyl modified nucleotide with phosphorothioate linkage
  modified_base 100: mod_base = OTHER; note = 2'-O-methyl modified nucleotide

SEQ ID NO: 2020 - RNA, 100 nt, synthetic construct; identical to SEQ ID NO: 1020
  source 1..100: mol_type = other RNA
  modified_base 1: mod_base = OTHER; note = 2'-O-methyl modified nucleotide with phosphorothioate linkage
  modified_base 2: mod_base = OTHER; note = 2'-O-methyl modified nucleotide with phosphorothioate linkage
  modified_base 3: mod_base = OTHER; note = 2'-O-methyl modified nucleotide with phosphorothioate linkage
  modified_base 29: mod_base = OTHER; note = 2'-O-methyl modified nucleotide
  modified_base 30: mod_base = OTHER; note = 2'-O-methyl modified nucleotide
  modified_base 31: mod_base = OTHER; note = 2'-O-methyl modified nucleotide
  modified_base 32: mod_base = OTHER; note = 2'-O-methyl modified nucleotide
  modified_base 33: mod_base = OTHER; note = 2'-O-methyl modified nucleotide
  modified_base 34: mod_base = OTHER; note = 2'-O-methyl modified nucleotide
  modified_base 35: mod_base = OTHER; note = 2'-O-methyl modified nucleotide
  modified_base 36: mod_base = OTHER; note = 2'-O-methyl modified nucleotide
  modified_base 37: mod_base = OTHER; note = 2'-O-methyl modified nucleotide
  modified_base 38: mod_base = OTHER; note = 2'-O-methyl modified nucleotide
  modified_base 39: mod_base = OTHER; note = 2'-O-methyl modified nucleotide
  modified_base 40: mod_base = OTHER; note = 2'-O-methyl modified nucleotide
  modified_base 69: mod_base = OTHER; note = 2'-O-methyl modified nucleotide
  modified_base 70: mod_base = OTHER; note = 2'-O-methyl modified nucleotide
  modified_base 71: mod_base = OTHER; note = 2'-O-methyl modified nucleotide
  modified_base 72: mod_base = OTHER; note = 2'-O-methyl modified nucleotide
  modified_base 73: mod_base = OTHER; note = 2'-O-methyl modified nucleotide
  modified_base 74: mod_base = OTHER; note = 2'-O-methyl modified nucleotide
  modified_base 75: mod_base = OTHER; note = 2'-O-methyl modified nucleotide
  modified_base 76: mod_base = OTHER; note = 2'-O-methyl modified nucleotide
  modified_base 77: mod_base = OTHER; note = 2'-O-methyl modified nucleotide
  modified_base 78: mod_base = OTHER; note = 2'-O-methyl modified nucleotide
  modified_base 79: mod_base = OTHER; note = 2'-O-methyl modified nucleotide
  modified_base 80: mod_base = OTHER; note = 2'-O-methyl modified nucleotide
  modified_base 81: mod_base = OTHER; note = 2'-O-methyl modified nucleotide
  modified_base 82: mod_base = OTHER; note = 2'-O-methyl modified nucleotide
  modified_base 83: mod_base = OTHER; note = 2'-O-methyl modified nucleotide
  modified_base 84: mod_base = OTHER; note = 2'-O-methyl modified nucleotide
  modified_base 85: mod_base = OTHER; note = 2'-O-methyl modified nucleotide
  modified_base 86: mod_base = OTHER; note = 2'-O-methyl modified nucleotide
  modified_base 87: mod_base = OTHER; note = 2'-O-methyl modified nucleotide
  modified_base 88: mod_base = OTHER; note = 2'-O-methyl modified nucleotide
  modified_base 89: mod_base = OTHER; note = 2'-O-methyl modified nucleotide
  modified_base 90: mod_base = OTHER; note = 2'-O-methyl modified nucleotide
  modified_base 91: mod_base = OTHER; note = 2'-O-methyl modified nucleotide
  modified_base 92: mod_base = OTHER; note = 2'-O-methyl modified nucleotide
  modified_base 93: mod_base = OTHER; note = 2'-O-methyl modified nucleotide
  modified_base 94: mod_base = OTHER; note = 2'-O-methyl modified nucleotide
  modified_base 95: mod_base = OTHER; note = 2'-O-methyl modified nucleotide
  modified_base 96: mod_base = OTHER; note = 2'-O-methyl modified nucleotide
  modified_base 97: mod_base = OTHER; note = 2'-O-methyl modified nucleotide with phosphorothioate linkage
  modified_base 98: mod_base = OTHER; note = 2'-O-methyl modified nucleotide with phosphorothioate linkage
  modified_base 99: mod_base = OTHER; note = 2'-O-methyl modified nucleotide with phosphorothioate linkage
  modified_base 100: mod_base = OTHER; note = 2'-O-methyl modified nucleotide

SEQ ID NO: 2021 - RNA, 100 nt, synthetic construct; identical to SEQ ID NO: 1021
  source 1..100: mol_type = other RNA
  modified_base 1: mod_base = OTHER; note = 2'-O-methyl modified nucleotide with phosphorothioate linkage
  modified_base 2: mod_base = OTHER; note = 2'-O-methyl modified nucleotide with phosphorothioate linkage
  modified_base 3: mod_base = OTHER; note = 2'-O-methyl modified nucleotide with phosphorothioate linkage
  modified_base 29: mod_base = OTHER; note = 2'-O-methyl modified nucleotide
  modified_base 30: mod_base = OTHER; note = 2'-O-methyl modified nucleotide
  modified_base 31: mod_base = OTHER; note = 2'-O-methyl modified nucleotide
  modified_base 32: mod_base = OTHER; note = 2'-O-methyl modified nucleotide
  modified_base 33: mod_base = OTHER; note = 2'-O-methyl modified nucleotide
  modified_base 34: mod_base = OTHER; note = 2'-O-methyl modified nucleotide
  modified_base 35: mod_base = OTHER; note = 2'-O-methyl modified nucleotide
  modified_base 36: mod_base = OTHER; note = 2'-O-methyl modified nucleotide
  modified_base 37: mod_base = OTHER; note = 2'-O-methyl modified nucleotide
  modified_base 38: mod_base = OTHER; note = 2'-O-methyl modified nucleotide
  modified_base 39: mod_base = OTHER; note = 2'-O-methyl modified nucleotide
  modified_base 40: mod_base = OTHER; note = 2'-O-methyl modified nucleotide
  modified_base 69: mod_base = OTHER; note = 2'-O-methyl modified nucleotide
  modified_base 70: mod_base = OTHER; note = 2'-O-methyl modified nucleotide
  modified_base 71: mod_base = OTHER; note = 2'-O-methyl modified nucleotide
  modified_base 72: mod_base = OTHER; note = 2'-O-methyl modified nucleotide
  modified_base 73: mod_base = OTHER; note = 2'-O-methyl modified nucleotide
  modified_base 74: mod_base = OTHER; note = 2'-O-methyl modified nucleotide
  modified_base 75: mod_base = OTHER; note = 2'-O-methyl modified nucleotide
  modified_base 76: mod_base = OTHER; note = 2'-O-methyl modified nucleotide
  modified_base 77: mod_base = OTHER; note = 2'-O-methyl modified nucleotide
  modified_base 78: mod_base = OTHER; note = 2'-O-methyl modified nucleotide
  modified_base 79: mod_base = OTHER; note = 2'-O-methyl modified nucleotide
  modified_base 80: mod_base = OTHER; note = 2'-O-methyl modified nucleotide
  modified_base 81: mod_base = OTHER; note = 2'-O-methyl modified nucleotide
  modified_base 82: mod_base = OTHER; note = 2'-O-methyl modified nucleotide
  modified_base 83: mod_base = OTHER; note = 2'-O-methyl modified nucleotide
  modified_base 84: mod_base = OTHER; note = 2'-O-methyl modified nucleotide
  modified_base 85: mod_base = OTHER; note = 2'-O-methyl modified nucleotide
  modified_base 86: mod_base = OTHER; note = 2'-O-methyl modified nucleotide
  modified_base 87: mod_base = OTHER; note = 2'-O-methyl modified nucleotide
  modified_base 88: mod_base = OTHER; note = 2'-O-methyl modified nucleotide
  modified_base 89: mod_base = OTHER; note = 2'-O-methyl modified nucleotide
  modified_base 90: mod_base = OTHER; note = 2'-O-methyl modified nucleotide
  modified_base 91: mod_base = OTHER; note = 2'-O-methyl modified nucleotide
  modified_base 92: mod_base = OTHER; note = 2'-O-methyl modified nucleotide
  modified_base 93: mod_base = OTHER; note = 2'-O-methyl modified nucleotide
  modified_base 94: mod_base = OTHER; note = 2'-O-methyl modified nucleotide
  modified_base 95: mod_base = OTHER; note = 2'-O-methyl modified nucleotide
  modified_base 96: mod_base = OTHER; note = 2'-O-methyl modified nucleotide
  modified_base 97: mod_base = OTHER; note = 2'-O-methyl modified nucleotide with phosphorothioate linkage
  modified_base 98: mod_base = OTHER; note = 2'-O-methyl modified nucleotide with phosphorothioate linkage
  modified_base 99: mod_base = OTHER; note = 2'-O-methyl modified nucleotide with phosphorothioate linkage
  modified_base 100: mod_base = OTHER; note = 2'-O-methyl modified nucleotide

SEQ ID NO: 2022 - RNA, 100 nt, synthetic construct; identical to SEQ ID NO: 1022
  source 1..100: mol_type = other RNA
  modified_base 1: mod_base = OTHER; note = 2'-O-methyl modified nucleotide with phosphorothioate linkage
  modified_base 2: mod_base = OTHER; note = 2'-O-methyl modified nucleotide with phosphorothioate linkage
  modified_base 3: mod_base = OTHER; note = 2'-O-methyl modified nucleotide with phosphorothioate linkage
  modified_base 29: mod_base = OTHER; note = 2'-O-methyl modified nucleotide
  modified_base 30: mod_base = OTHER; note = 2'-O-methyl modified nucleotide
  modified_base 31: mod_base = OTHER; note = 2'-O-methyl modified nucleotide
  modified_base 32: mod_base = OTHER; note = 2'-O-methyl modified nucleotide
  modified_base 33: mod_base = OTHER; note = 2'-O-methyl modified nucleotide
  modified_base 34: mod_base = OTHER; note = 2'-O-methyl modified nucleotide
  modified_base 35: mod_base = OTHER; note = 2'-O-methyl modified nucleotide
  modified_base 36: mod_base = OTHER; note = 2'-O-methyl modified nucleotide
  modified_base 37: mod_base = OTHER; note = 2'-O-methyl modified nucleotide
  modified_base 38: mod_base = OTHER; note = 2'-O-methyl modified nucleotide
  modified_base 39: mod_base = OTHER; note = 2'-O-methyl modified nucleotide
  modified_base 40: mod_base = OTHER; note = 2'-O-methyl modified nucleotide
  modified_base 69: mod_base = OTHER; note = 2'-O-methyl modified nucleotide
  modified_base 70: mod_base = OTHER; note = 2'-O-methyl modified nucleotide
  modified_base 71: mod_base = OTHER; note = 2'-O-methyl modified nucleotide
  modified_base 72: mod_base = OTHER; note = 2'-O-methyl modified nucleotide
  modified_base 73: mod_base = OTHER; note = 2'-O-methyl modified nucleotide
  modified_base 74: mod_base = OTHER; note = 2'-O-methyl modified nucleotide
  modified_base 75: mod_base = OTHER; note = 2'-O-methyl modified nucleotide
  modified_base 76: mod_base = OTHER; note = 2'-O-methyl modified nucleotide
  modified_base 77: mod_base = OTHER; note = 2'-O-methyl modified nucleotide
  modified_base 78: mod_base = OTHER; note = 2'-O-methyl modified nucleotide
  modified_base 79: mod_base = OTHER; note = 2'-O-methyl modified nucleotide
  modified_base 80: mod_base = OTHER; note = 2'-O-methyl modified nucleotide
  modified_base 81: mod_base = OTHER; note = 2'-O-methyl modified nucleotide
  modified_base 82: mod_base = OTHER; note = 2'-O-methyl modified nucleotide
  modified_base 83: mod_base = OTHER; note = 2'-O-methyl modified nucleotide
  modified_base 84: mod_base = OTHER; note = 2'-O-methyl modified nucleotide
  modified_base 85: mod_base = OTHER; note = 2'-O-methyl modified nucleotide
  modified_base 86: mod_base = OTHER; note = 2'-O-methyl modified nucleotide
  modified_base 87: mod_base = OTHER; note = 2'-O-methyl modified nucleotide
  modified_base 88: mod_base = OTHER; note = 2'-O-methyl modified nucleotide
  modified_base 89: mod_base = OTHER; note = 2'-O-methyl modified nucleotide
  modified_base 90: mod_base = OTHER; note = 2'-O-methyl modified nucleotide
  modified_base 91: mod_base = OTHER; note = 2'-O-methyl modified nucleotide
  modified_base 92: mod_base = OTHER; note = 2'-O-methyl modified nucleotide
  modified_base 93: mod_base = OTHER; note = 2'-O-methyl modified nucleotide
  modified_base 94: mod_base = OTHER; note = 2'-O-methyl modified nucleotide
  modified_base 95: mod_base = OTHER; note = 2'-O-methyl modified nucleotide
  modified_base 96: mod_base = OTHER; note = 2'-O-methyl modified nucleotide
  modified_base 97: mod_base = OTHER; note = 2'-O-methyl modified nucleotide with phosphorothioate linkage
  modified_base 98: mod_base = OTHER; note = 2'-O-methyl modified nucleotide with phosphorothioate linkage
  modified_base 99: mod_base = OTHER; note = 2'-O-methyl modified nucleotide with phosphorothioate linkage
  modified_base 100: mod_base = OTHER; note = 2'-O-methyl modified nucleotide

SEQ ID NO: 2023 - RNA, 100 nt, synthetic construct; identical to SEQ ID NO: 1023
  source 1..100: mol_type = other RNA
  modified_base 1: mod_base = OTHER; note = 2'-O-methyl modified nucleotide with phosphorothioate linkage
  modified_base 2: mod_base = OTHER; note = 2'-O-methyl modified nucleotide with phosphorothioate linkage
  modified_base 3: mod_base = OTHER; note = 2'-O-methyl modified nucleotide with phosphorothioate linkage
  modified_base 29: mod_base = OTHER; note = 2'-O-methyl modified nucleotide
  modified_base 30: mod_base = OTHER; note = 2'-O-methyl modified nucleotide
  modified_base 31: mod_base = OTHER; note = 2'-O-methyl modified nucleotide
  modified_base 32: mod_base = OTHER; note = 2'-O-methyl modified nucleotide
  modified_base 33: mod_base = OTHER; note = 2'-O-methyl modified nucleotide
  modified_base 34: mod_base = OTHER; note = 2'-O-methyl modified nucleotide
  modified_base 35: mod_base = OTHER; note = 2'-O-methyl modified nucleotide
  modified_base 36: mod_base = OTHER; note = 2'-O-methyl modified nucleotide
  modified_base 37: mod_base = OTHER; note = 2'-O-methyl modified nucleotide
  modified_base 38: mod_base = OTHER; note = 2'-O-methyl modified nucleotide
  modified_base 39: mod_base = OTHER; note = 2'-O-methyl modified nucleotide
  modified_base 40: mod_base = OTHER; note = 2'-O-methyl modified nucleotide
  modified_base 69: mod_base = OTHER; note = 2'-O-methyl modified nucleotide
  modified_base 70: mod_base = OTHER; note = 2'-O-methyl modified nucleotide
  modified_base 71: mod_base = OTHER; note = 2'-O-methyl modified nucleotide
  modified_base 72: mod_base = OTHER; note = 2'-O-methyl modified nucleotide
  modified_base 73: mod_base = OTHER; note = 2'-O-methyl modified nucleotide
  modified_base 74: mod_base = OTHER; note = 2'-O-methyl modified nucleotide
  modified_base 75: mod_base = OTHER; note = 2'-O-methyl modified nucleotide
  modified_base 76: mod_base = OTHER; note = 2'-O-methyl modified nucleotide
  modified_base 77: mod_base = OTHER; note = 2'-O-methyl modified nucleotide
  modified_base 78: mod_base = OTHER; note = 2'-O-methyl modified nucleotide
  modified_base 79: mod_base = OTHER; note = 2'-O-methyl modified nucleotide
  modified_base 80: mod_base = OTHER; note = 2'-O-methyl modified nucleotide
  modified_base 81: mod_base = OTHER; note = 2'-O-methyl modified nucleotide
  modified_base 82: mod_base = OTHER; note = 2'-O-methyl modified nucleotide
  modified_base 83: mod_base = OTHER; note = 2'-O-methyl modified nucleotide
  modified_base 84: mod_base = OTHER; note = 2'-O-methyl modified nucleotide
  modified_base 85: mod_base = OTHER; note = 2'-O-methyl modified nucleotide
  modified_base 86: mod_base = OTHER; note = 2'-O-methyl modified nucleotide
  modified_base 87: mod_base = OTHER; note = 2'-O-methyl modified nucleotide
  modified_base 88: mod_base = OTHER; note = 2'-O-methyl modified nucleotide
  modified_base 89: mod_base = OTHER; note = 2'-O-methyl modified nucleotide
  modified_base 90: mod_base = OTHER; note = 2'-O-methyl modified nucleotide
  modified_base 91: mod_base = OTHER; note = 2'-O-methyl modified nucleotide
  modified_base 92: mod_base = OTHER; note = 2'-O-methyl modified nucleotide
  modified_base 93: mod_base = OTHER; note = 2'-O-methyl modified nucleotide
  modified_base 94: mod_base = OTHER; note = 2'-O-methyl modified nucleotide
  modified_base 95: mod_base = OTHER; note = 2'-O-methyl modified nucleotide
  modified_base 96: mod_base = OTHER; note = 2'-O-methyl modified nucleotide
  modified_base 97: mod_base = OTHER; note = 2'-O-methyl modified nucleotide with phosphorothioate linkage
  modified_base 98: mod_base = OTHER; note = 2'-O-methyl modified nucleotide with phosphorothioate linkage
  modified_base 99: mod_base = OTHER; note = 2'-O-methyl modified nucleotide with phosphorothioate linkage
  modified_base 100: mod_base = OTHER; note = 2'-O-methyl modified nucleotide

SEQ ID NO: 2024 - RNA, 100 nt, synthetic construct; identical to SEQ ID NO: 1024
  source 1..100: mol_type = other RNA
  modified_base 1: mod_base = OTHER; note = 2'-O-methyl modified nucleotide with phosphorothioate linkage
  modified_base 2: mod_base = OTHER; note = 2'-O-methyl modified nucleotide with phosphorothioate linkage
  modified_base 3: mod_base = OTHER; note = 2'-O-methyl modified nucleotide with phosphorothioate linkage
  modified_base 29: mod_base = OTHER; note = 2'-O-methyl modified nucleotide
  modified_base 30: mod_base = OTHER; note = 2'-O-methyl modified nucleotide
  modified_base 31: mod_base = OTHER; note = 2'-O-methyl modified nucleotide
  modified_base 32: mod_base = OTHER; note = 2'-O-methyl modified nucleotide
  modified_base 33: mod_base = OTHER; note = 2'-O-methyl modified nucleotide
  modified_base 34: mod_base = OTHER; note = 2'-O-methyl modified nucleotide
  modified_base 35: mod_base = OTHER; note = 2'-O-methyl modified nucleotide
  modified_base 36: mod_base = OTHER; note = 2'-O-methyl modified nucleotide
  modified_base 37: mod_base = OTHER; note = 2'-O-methyl modified nucleotide
  modified_base 38: mod_base = OTHER; note = 2'-O-methyl modified nucleotide
  modified_base 39: mod_base = OTHER; note = 2'-O-methyl modified nucleotide
  modified_base 40: mod_base = OTHER; note = 2'-O-methyl modified nucleotide
  modified_base 69: mod_base = OTHER; note = 2'-O-methyl modified nucleotide
  modified_base 70: mod_base = OTHER; note = 2'-O-methyl modified nucleotide
  modified_base 71: mod_base = OTHER; note = 2'-O-methyl modified nucleotide
  modified_base 72: mod_base = OTHER; note = 2'-O-methyl modified nucleotide
  modified_base 73: mod_base = OTHER; note = 2'-O-methyl modified nucleotide
  modified_base 74: mod_base = OTHER; note = 2'-O-methyl modified nucleotide
  modified_base 75: mod_base = OTHER; note = 2'-O-methyl modified nucleotide
  modified_base 76: mod_base = OTHER; note = 2'-O-methyl modified nucleotide
  modified_base 77: mod_base = OTHER; note = 2'-O-methyl modified nucleotide
  modified_base 78: mod_base = OTHER; note = 2'-O-methyl modified nucleotide
  modified_base 79: mod_base = OTHER; note = 2'-O-methyl modified nucleotide
  modified_base 80: mod_base = OTHER; note = 2'-O-methyl modified nucleotide
  modified_base 81: mod_base = OTHER; note = 2'-O-methyl modified nucleotide
  modified_base 82: mod_base = OTHER; note = 2'-O-methyl modified nucleotide
  modified_base 83: mod_base = OTHER; note = 2'-O-methyl modified nucleotide
  modified_base 84: mod_base = OTHER; note = 2'-O-methyl modified nucleotide
  modified_base 85: mod_base = OTHER; note = 2'-O-methyl modified nucleotide
  modified_base 86: mod_base = OTHER; note = 2'-O-methyl modified nucleotide
  modified_base 87: mod_base = OTHER; note = 2'-O-methyl modified nucleotide
  modified_base 88: mod_base = OTHER; note = 2'-O-methyl modified nucleotide
  modified_base 89: mod_base = OTHER; note = 2'-O-methyl modified nucleotide
  modified_base 90: mod_base = OTHER; note = 2'-O-methyl modified nucleotide
  modified_base 91: mod_base = OTHER; note = 2'-O-methyl modified nucleotide
  modified_base 92: mod_base = OTHER; note = 2'-O-methyl modified nucleotide
  modified_base 93: mod_base = OTHER; note = 2'-O-methyl modified nucleotide
  modified_base 94: mod_base = OTHER; note = 2'-O-methyl modified nucleotide
  modified_base 95: mod_base = OTHER; note = 2'-O-methyl modified nucleotide
  modified_base 96: mod_base = OTHER; note = 2'-O-methyl modified nucleotide
  modified_base 97: mod_base = OTHER; note = 2'-O-methyl modified nucleotide with phosphorothioate linkage
  modified_base 98: mod_base = OTHER; note = 2'-O-methyl modified nucleotide with phosphorothioate linkage
  modified_base 99: mod_base = OTHER; note = 2'-O-methyl modified nucleotide with phosphorothioate linkage
  modified_base 100: mod_base = OTHER; note = 2'-O-methyl modified nucleotide

SEQ ID NO: 2025 - RNA, 100 nt, synthetic construct; identical to SEQ ID NO: 1025
  source 1..100: mol_type = other RNA
  modified_base 1: mod_base = OTHER; note = 2'-O-methyl modified nucleotide with phosphorothioate linkage
  modified_base 2: mod_base = OTHER; note = 2'-O-methyl modified nucleotide with phosphorothioate linkage
  modified_base 3: mod_base = OTHER; note = 2'-O-methyl modified nucleotide with phosphorothioate linkage
  modified_base 29: mod_base = OTHER; note = 2'-O-methyl modified nucleotide
  modified_base 30: mod_base = OTHER; note = 2'-O-methyl modified nucleotide
  modified_base 31: mod_base = OTHER; note = 2'-O-methyl modified nucleotide
  modified_base 32: mod_base = OTHER; note = 2'-O-methyl modified nucleotide
  modified_base 33: mod_base = OTHER; note = 2'-O-methyl modified nucleotide
  modified_base 34: mod_base = OTHER; note = 2'-O-methyl modified nucleotide
  modified_base 35: mod_base = OTHER; note = 2'-O-methyl modified nucleotide
  modified_base 36: mod_base = OTHER; note = 2'-O-methyl modified nucleotide
  modified_base 37: mod_base = OTHER; note = 2'-O-methyl modified nucleotide
  modified_base 38: mod_base = OTHER; note = 2'-O-methyl modified nucleotide
  modified_base 39: mod_base = OTHER; note = 2'-O-methyl modified nucleotide
  modified_base 40: mod_base = OTHER; note = 2'-O-methyl modified nucleotide
  modified_base 69: mod_base = OTHER; note = 2'-O-methyl modified nucleotide
  modified_base 70: mod_base = OTHER; note = 2'-O-methyl modified nucleotide
  modified_base 71: mod_base = OTHER; note = 2'-O-methyl modified nucleotide
  modified_base 72: mod_base = OTHER; note = 2'-O-methyl modified nucleotide
  modified_base 73: mod_base = OTHER; note = 2'-O-methyl modified nucleotide
  modified_base 74: mod_base = OTHER; note = 2'-O-methyl modified nucleotide
  modified_base 75: mod_base = OTHER; note = 2'-O-methyl modified nucleotide
  modified_base 76: mod_base = OTHER; note = 2'-O-methyl modified nucleotide
  modified_base 77: mod_base = OTHER; note = 2'-O-methyl modified nucleotide
  modified_base 78: mod_base = OTHER; note = 2'-O-methyl modified nucleotide
  modified_base 79: mod_base = OTHER; note = 2'-O-methyl modified nucleotide
  modified_base 80: mod_base = OTHER; note = 2'-O-methyl modified nucleotide
  modified_base 81: mod_base = OTHER; note = 2'-O-methyl modified nucleotide
  modified_base 82: mod_base = OTHER; note = 2'-O-methyl modified nucleotide
  modified_base 83: mod_base = OTHER; note = 2'-O-methyl modified nucleotide
  modified_base 84: mod_base = OTHER; note = 2'-O-methyl modified nucleotide
  modified_base 85: mod_base = OTHER; note = 2'-O-methyl modified nucleotide
  modified_base 86: mod_base = OTHER; note = 2'-O-methyl modified nucleotide
  modified_base 87: mod_base = OTHER; note = 2'-O-methyl modified nucleotide
  modified_base 88: mod_base = OTHER; note = 2'-O-methyl modified nucleotide
  modified_base 89: mod_base = OTHER; note = 2'-O-methyl modified nucleotide
  modified_base 90: mod_base = OTHER; note = 2'-O-methyl modified nucleotide
  modified_base 91: mod_base = OTHER; note = 2'-O-methyl modified nucleotide
  modified_base 92: mod_base = OTHER; note = 2'-O-methyl modified nucleotide
  modified_base 93: mod_base = OTHER; note = 2'-O-methyl modified nucleotide
  modified_base 94: mod_base = OTHER; note = 2'-O-methyl modified nucleotide
  modified_base 95: mod_base = OTHER; note = 2'-O-methyl modified nucleotide
  modified_base 96: mod_base = OTHER; note = 2'-O-methyl modified nucleotide
  modified_base 97: mod_base = OTHER; note = 2'-O-methyl modified nucleotide with phosphorothioate linkage
  modified_base 98: mod_base = OTHER; note = 2'-O-methyl modified nucleotide with phosphorothioate linkage
  modified_base 99: mod_base = OTHER; note = 2'-O-methyl modified nucleotide with phosphorothioate linkage
  modified_base 100: mod_base = OTHER; note = 2'-O-methyl modified nucleotide

SEQ ID NO: 2026 - RNA, 100 nt, synthetic construct; identical to SEQ ID NO: 1026
  source 1..100: mol_type = other RNA
  modified_base 1: mod_base = OTHER; note = 2'-O-methyl modified nucleotide with phosphorothioate linkage
  modified_base 2: mod_base = OTHER; note = 2'-O-methyl modified nucleotide with phosphorothioate linkage
  modified_base 3: mod_base = OTHER; note = 2'-O-methyl modified nucleotide with phosphorothioate linkage
  modified_base 29: mod_base = OTHER; note = 2'-O-methyl modified nucleotide
  modified_base 30: mod_base = OTHER; note = 2'-O-methyl modified nucleotide
  modified_base 31: mod_base = OTHER; note = 2'-O-methyl modified nucleotide
  modified_base 32: mod_base = OTHER; note = 2'-O-methyl modified nucleotide
  modified_base 33: mod_base = OTHER; note = 2'-O-methyl modified nucleotide
  modified_base 34: mod_base = OTHER; note = 2'-O-methyl modified nucleotide
  modified_base 35: mod_base = OTHER; note = 2'-O-methyl modified nucleotide
  modified_base 36: mod_base = OTHER; note = 2'-O-methyl modified nucleotide
  modified_base 37: mod_base = OTHER; note = 2'-O-methyl modified nucleotide
  modified_base 38: mod_base = OTHER; note = 2'-O-methyl modified nucleotide
  modified_base 39: mod_base = OTHER; note = 2'-O-methyl modified nucleotide
  modified_base 40: mod_base = OTHER; note = 2'-O-methyl modified nucleotide
  modified_base 69: mod_base = OTHER; note = 2'-O-methyl modified nucleotide
  modified_base 70: mod_base = OTHER; note = 2'-O-methyl modified nucleotide
  modified_base 71: mod_base = OTHER; note = 2'-O-methyl modified nucleotide
  modified_base 72: mod_base = OTHER; note = 2'-O-methyl modified nucleotide
  modified_base 73: mod_base = OTHER; note = 2'-O-methyl modified nucleotide
  modified_base 74: mod_base = OTHER; note = 2'-O-methyl modified nucleotide
  modified_base 75: mod_base = OTHER; note = 2'-O-methyl modified nucleotide
  modified_base 76: mod_base = OTHER; note = 2'-O-methyl modified nucleotide
  modified_base 77: mod_base = OTHER; note = 2'-O-methyl modified nucleotide
  modified_base 78: mod_base = OTHER; note = 2'-O-methyl modified nucleotide
  modified_base 79: mod_base = OTHER; note = 2'-O-methyl modified nucleotide
  modified_base 80: mod_base = OTHER; note = 2'-O-methyl modified nucleotide
  modified_base 81: mod_base = OTHER; note = 2'-O-methyl modified nucleotide
  modified_base 82: mod_base = OTHER; note = 2'-O-methyl modified nucleotide
  modified_base 83: mod_base = OTHER; note = 2'-O-methyl modified nucleotide
  modified_base 84: mod_base = OTHER; note = 2'-O-methyl modified nucleotide
  modified_base 85: mod_base = OTHER; note = 2'-O-methyl modified nucleotide
  modified_base 86: mod_base = OTHER; note = 2'-O-methyl modified nucleotide
  modified_base 87: mod_base = OTHER; note = 2'-O-methyl modified nucleotide
  modified_base 88: mod_base = OTHER; note = 2'-O-methyl modified nucleotide
  modified_base 89: mod_base = OTHER; note = 2'-O-methyl modified nucleotide
  modified_base 90: mod_base = OTHER; note = 2'-O-methyl modified nucleotide
  modified_base 91: mod_base = OTHER; note = 2'-O-methyl modified nucleotide
  modified_base 92: mod_base = OTHER; note = 2'-O-methyl modified nucleotide
  modified_base 93: mod_base = OTHER; note = 2'-O-methyl modified nucleotide
  modified_base 94: mod_base = OTHER; note = 2'-O-methyl modified nucleotide
  modified_base 95: mod_base = OTHER; note = 2'-O-methyl modified nucleotide
  modified_base 96: mod_base = OTHER; note = 2'-O-methyl modified nucleotide
  modified_base 97: mod_base = OTHER; note = 2'-O-methyl modified nucleotide with phosphorothioate linkage
  modified_base 98: mod_base = OTHER; note = 2'-O-methyl modified nucleotide with phosphorothioate linkage
  modified_base 99: mod_base = OTHER; note = 2'-O-methyl modified nucleotide with phosphorothioate linkage
  modified_base 100: mod_base = OTHER; note = 2'-O-methyl modified nucleotide

SEQ ID NO: 2027 - RNA, 100 nt, synthetic construct; identical to SEQ ID NO: 1027
  source 1..100: mol_type = other RNA
  modified_base 1: mod_base = OTHER; note = 2'-O-methyl modified nucleotide with phosphorothioate linkage
  modified_base 2: mod_base = OTHER; note = 2'-O-methyl modified nucleotide with phosphorothioate linkage
  modified_base 3: mod_base = OTHER; note = 2'-O-methyl modified nucleotide with phosphorothioate linkage
  modified_base 29: mod_base = OTHER; note = 2'-O-methyl modified nucleotide
  modified_base 30: mod_base = OTHER; note = 2'-O-methyl modified nucleotide
  modified_base 31: mod_base = OTHER; note = 2'-O-methyl modified nucleotide
  modified_base 32: mod_base = OTHER; note = 2'-O-methyl modified nucleotide
  modified_base 33: mod_base = OTHER; note = 2'-O-methyl modified nucleotide
  modified_base 34: mod_base = OTHER; note = 2'-O-methyl modified nucleotide
  modified_base 35: mod_base = OTHER; note = 2'-O-methyl modified nucleotide
  modified_base 36: mod_base = OTHER; note = 2'-O-methyl modified nucleotide
  modified_base 37: mod_base = OTHER; note = 2'-O-methyl modified nucleotide
  modified_base 38: mod_base = OTHER; note = 2'-O-methyl modified nucleotide
  modified_base 39: mod_base = OTHER; note = 2'-O-methyl modified nucleotide
  modified_base 40: mod_base = OTHER; note = 2'-O-methyl modified nucleotide
  modified_base 69: mod_base = OTHER; note = 2'-O-methyl modified nucleotide
  modified_base 70: mod_base = OTHER; note = 2'-O-methyl modified nucleotide
  modified_base 71: mod_base = OTHER; note = 2'-O-methyl modified nucleotide
  modified_base 72: mod_base = OTHER; note = 2'-O-methyl modified nucleotide
  modified_base 73: mod_base = OTHER; note = 2'-O-methyl modified nucleotide
  modified_base 74: mod_base = OTHER; note = 2'-O-methyl modified nucleotide
  modified_base 75: mod_base = OTHER; note = 2'-O-methyl modified nucleotide
  modified_base 76: mod_base = OTHER; note = 2'-O-methyl modified nucleotide
  modified_base 77: mod_base = OTHER; note = 2'-O-methyl modified nucleotide
  modified_base 78: mod_base = OTHER; note = 2'-O-methyl modified nucleotide
  modified_base 79: mod_base = OTHER; note = 2'-O-methyl modified nucleotide
  modified_base 80: mod_base = OTHER; note = 2'-O-methyl modified nucleotide
  modified_base 81: mod_base = OTHER; note = 2'-O-methyl modified nucleotide
  modified_base 82: mod_base = OTHER; note = 2'-O-methyl modified nucleotide
  modified_base 83: mod_base = OTHER; note = 2'-O-methyl modified nucleotide
  modified_base 84: mod_base = OTHER; note = 2'-O-methyl modified nucleotide
  modified_base 85: mod_base = OTHER; note = 2'-O-methyl modified nucleotide
  modified_base 86: mod_base = OTHER; note = 2'-O-methyl modified nucleotide
  modified_base 87: mod_base = OTHER; note = 2'-O-methyl modified nucleotide
  modified_base 88: mod_base = OTHER; note = 2'-O-methyl modified nucleotide
  modified_base 89: mod_base = OTHER; note = 2'-O-methyl modified nucleotide
  modified_base 90: mod_base = OTHER; note = 2'-O-methyl modified nucleotide
  modified_base 91: mod_base = OTHER; note = 2'-O-methyl modified nucleotide
  modified_base 92: mod_base = OTHER; note = 2'-O-methyl modified nucleotide
  modified_base 93: mod_base = OTHER; note = 2'-O-methyl modified nucleotide
  modified_base 94: mod_base = OTHER; note = 2'-O-methyl modified nucleotide
  modified_base 95: mod_base = OTHER; note = 2'-O-methyl modified nucleotide
  modified_base 96: mod_base = OTHER; note = 2'-O-methyl modified nucleotide
  modified_base 97: mod_base = OTHER; note = 2'-O-methyl modified nucleotide with phosphorothioate linkage
  modified_base 98: mod_base = OTHER; note = 2'-O-methyl modified nucleotide with phosphorothioate linkage
  modified_base 99: mod_base = OTHER; note = 2'-O-methyl modified nucleotide with phosphorothioate linkage
  modified_base 100: mod_base = OTHER; note = 2'-O-methyl modified nucleotide

SEQ ID NO: 2028 - RNA, 100 nt, synthetic construct; identical to SEQ ID NO: 1028
  source 1..100: mol_type = other RNA
  modified_base 1: mod_base = OTHER; note = 2'-O-methyl modified nucleotide with phosphorothioate linkage
  modified_base 2: mod_base = OTHER; note = 2'-O-methyl modified nucleotide with phosphorothioate linkage
  modified_base 3: mod_base = OTHER; note = 2'-O-methyl modified nucleotide with phosphorothioate linkage
  modified_base 29: mod_base = OTHER; note = 2'-O-methyl modified nucleotide
  modified_base 30: mod_base = OTHER; note = 2'-O-methyl modified nucleotide
  modified_base 31: mod_base = OTHER; note = 2'-O-methyl modified nucleotide
  modified_base 32: mod_base = OTHER; note = 2'-O-methyl modified nucleotide
  modified_base 33: mod_base = OTHER; note = 2'-O-methyl modified nucleotide
  modified_base 34: mod_base = OTHER; note = 2'-O-methyl modified nucleotide
  modified_base 35: mod_base = OTHER; note = 2'-O-methyl modified nucleotide
  modified_base 36: mod_base = OTHER; note = 2'-O-methyl modified nucleotide
  modified_base 37: mod_base = OTHER; note = 2'-O-methyl modified nucleotide
  modified_base 38: mod_base = OTHER; note = 2'-O-methyl modified nucleotide
  modified_base 39: mod_base = OTHER; note = 2'-O-methyl modified nucleotide
  modified_base 40: mod_base = OTHER; note = 2'-O-methyl modified nucleotide
  modified_base 69: mod_base = OTHER; note = 2'-O-methyl modified nucleotide
  modified_base 70: mod_base = OTHER; note = 2'-O-methyl modified nucleotide
  modified_base 71: mod_base = OTHER; note = 2'-O-methyl modified nucleotide
  modified_base 72: mod_base = OTHER; note = 2'-O-methyl modified nucleotide
  modified_base 73: mod_base = OTHER; note = 2'-O-methyl modified nucleotide
  modified_base 74: mod_base = OTHER; note = 2'-O-methyl modified nucleotide
  modified_base 75: mod_base = OTHER; note = 2'-O-methyl modified nucleotide
  modified_base 76: mod_base = OTHER; note = 2'-O-methyl modified nucleotide
  modified_base 77: mod_base = OTHER; note = 2'-O-methyl modified nucleotide
  modified_base 78: mod_base = OTHER; note = 2'-O-methyl modified nucleotide
  modified_base 79: mod_base = OTHER; note = 2'-O-methyl modified nucleotide
  modified_base 80: mod_base = OTHER; note = 2'-O-methyl modified nucleotide
  modified_base 81: mod_base = OTHER; note = 2'-O-methyl modified nucleotide
  modified_base 82: mod_base = OTHER; note = 2'-O-methyl modified nucleotide
  modified_base 83: mod_base = OTHER; note = 2'-O-methyl modified nucleotide
  modified_base 84: mod_base = OTHER; note = 2'-O-methyl modified nucleotide
  modified_base 85: mod_base = OTHER; note = 2'-O-methyl modified nucleotide
  modified_base 86: mod_base = OTHER; note = 2'-O-methyl modified nucleotide
  modified_base 87: mod_base = OTHER; note = 2'-O-methyl modified nucleotide
  modified_base 88: mod_base = OTHER; note = 2'-O-methyl modified nucleotide
  modified_base 89: mod_base = OTHER; note = 2'-O-methyl modified nucleotide
  modified_base 90: mod_base = OTHER; note = 2'-O-methyl modified nucleotide
  modified_base 91: mod_base = OTHER; note = 2'-O-methyl modified nucleotide
  modified_base 92: mod_base = OTHER; note = 2'-O-methyl modified nucleotide
  modified_base 93: mod_base = OTHER; note = 2'-O-methyl modified nucleotide
  modified_base 94: mod_base = OTHER; note = 2'-O-methyl modified nucleotide
  modified_base 95: mod_base = OTHER; note = 2'-O-methyl modified nucleotide
  modified_base 96: mod_base = OTHER; note = 2'-O-methyl modified nucleotide
  modified_base 97: mod_base = OTHER; note = 2'-O-methyl modified nucleotide with phosphorothioate linkage
  modified_base 98: mod_base = OTHER; note = 2'-O-methyl modified nucleotide with phosphorothioate linkage
  modified_base 99: mod_base = OTHER; note = 2'-O-methyl modified nucleotide with phosphorothioate linkage
  modified_base 100: mod_base = OTHER; note = 2'-O-methyl modified nucleotide

SEQ ID NO: 2029 - RNA, 100 nt, synthetic construct; identical to SEQ ID NO: 1029
  source 1..100: mol_type = other RNA
  modified_base 1: mod_base = OTHER; note = 2'-O-methyl modified nucleotide with phosphorothioate linkage
  modified_base 2: mod_base = OTHER; note = 2'-O-methyl modified nucleotide with phosphorothioate linkage
  modified_base 3: mod_base = OTHER; note = 2'-O-methyl modified nucleotide with phosphorothioate linkage
  modified_base 29: mod_base = OTHER; note = 2'-O-methyl modified nucleotide
  modified_base 30: mod_base = OTHER; note = 2'-O-methyl modified nucleotide
  modified_base 31: mod_base = OTHER; note = 2'-O-methyl modified nucleotide
  modified_base 32: mod_base = OTHER; note = 2'-O-methyl modified nucleotide
  modified_base 33: mod_base = OTHER; note = 2'-O-methyl modified nucleotide
  modified_base 34: mod_base = OTHER; note = 2'-O-methyl modified nucleotide
  modified_base 35: mod_base = OTHER; note = 2'-O-methyl modified nucleotide
  modified_base 36: mod_base = OTHER; note = 2'-O-methyl modified nucleotide
  modified_base 37: mod_base = OTHER; note = 2'-O-methyl modified nucleotide
  modified_base 38: mod_base = OTHER; note = 2'-O-methyl modified nucleotide
  modified_base 39: mod_base = OTHER; note = 2'-O-methyl modified nucleotide
  modified_base 40: mod_base = OTHER; note = 2'-O-methyl modified nucleotide
  modified_base 69: mod_base = OTHER; note = 2'-O-methyl modified nucleotide
  modified_base 70: mod_base = OTHER; note = 2'-O-methyl modified nucleotide
  modified_base 71: mod_base = OTHER; note = 2'-O-methyl modified nucleotide
  modified_base 72: mod_base = OTHER; note = 2'-O-methyl modified nucleotide
  modified_base 73: mod_base = OTHER; note = 2'-O-methyl modified nucleotide
  modified_base 74: mod_base = OTHER; note = 2'-O-methyl modified nucleotide
  modified_base 75: mod_base = OTHER; note = 2'-O-methyl modified nucleotide
  modified_base 76: mod_base = OTHER; note = 2'-O-methyl modified nucleotide
  modified_base 77: mod_base = OTHER; note = 2'-O-methyl modified nucleotide
  modified_base 78: mod_base = OTHER; note = 2'-O-methyl modified nucleotide
  modified_base 79: mod_base = OTHER; note = 2'-O-methyl modified nucleotide
  modified_base 80: mod_base = OTHER; note = 2'-O-methyl modified nucleotide
  modified_base 81: mod_base = OTHER; note = 2'-O-methyl modified nucleotide
  modified_base 82: mod_base = OTHER; note = 2'-O-methyl modified nucleotide
  modified_base 83: mod_base = OTHER; note = 2'-O-methyl modified nucleotide
  modified_base 84: mod_base = OTHER; note = 2'-O-methyl modified nucleotide
  modified_base 85: mod_base = OTHER; note = 2'-O-methyl modified nucleotide
  modified_base 86: mod_base = OTHER; note = 2'-O-methyl modified nucleotide
  modified_base 87: mod_base = OTHER; note = 2'-O-methyl modified nucleotide
  modified_base 88: mod_base = OTHER; note = 2'-O-methyl modified nucleotide
  modified_base 89: mod_base = OTHER; note = 2'-O-methyl modified nucleotide
  modified_base 90: mod_base = OTHER; note = 2'-O-methyl modified nucleotide
  modified_base 91: mod_base = OTHER; note = 2'-O-methyl modified nucleotide
  modified_base 92: mod_base = OTHER; note = 2'-O-methyl modified nucleotide
  modified_base 93: mod_base = OTHER; note = 2'-O-methyl modified nucleotide
  modified_base 94: mod_base = OTHER; note = 2'-O-methyl modified nucleotide
  modified_base 95: mod_base = OTHER; note = 2'-O-methyl modified nucleotide
  modified_base 96: mod_base = OTHER; note = 2'-O-methyl modified nucleotide
  modified_base 97: mod_base = OTHER; note = 2'-O-methyl modified nucleotide with phosphorothioate linkage
  modified_base 98: mod_base = OTHER; note = 2'-O-methyl modified nucleotide with phosphorothioate linkage
  modified_base 99: mod_base = OTHER; note = 2'-O-methyl modified nucleotide with phosphorothioate linkage
  modified_base 100: mod_base = OTHER; note = 2'-O-methyl modified nucleotide

SEQ ID NO: 2030 - RNA, 100 nt, synthetic construct; identical to SEQ ID NO: 1030
  source 1..100: mol_type = other RNA
  modified_base 1: mod_base = OTHER; note = 2'-O-methyl modified nucleotide with phosphorothioate linkage
  modified_base 2: mod_base = OTHER; note = 2'-O-methyl modified nucleotide with phosphorothioate linkage
  modified_base 3: mod_base = OTHER; note = 2'-O-methyl modified nucleotide with phosphorothioate linkage
  modified_base 29: mod_base = OTHER; note = 2'-O-methyl modified nucleotide
  modified_base 30: mod_base = OTHER; note = 2'-O-methyl modified nucleotide
  modified_base 31: mod_base = OTHER; note = 2'-O-methyl modified nucleotide
  modified_base 32: mod_base = OTHER; note = 2'-O-methyl modified nucleotide
  modified_base 33: mod_base = OTHER; note = 2'-O-methyl modified nucleotide
  modified_base 34: mod_base = OTHER; note = 2'-O-methyl modified nucleotide
  modified_base 35: mod_base = OTHER; note = 2'-O-methyl modified nucleotide
  modified_base 36: mod_base = OTHER; note = 2'-O-methyl modified nucleotide
  modified_base 37: mod_base = OTHER; note = 2'-O-methyl modified nucleotide
  modified_base 38: mod_base = OTHER; note = 2'-O-methyl modified nucleotide
  modified_base 39: mod_base = OTHER; note = 2'-O-methyl modified nucleotide
  modified_base 40: mod_base = OTHER; note = 2'-O-methyl modified nucleotide
  modified_base 69: mod_base = OTHER; note = 2'-O-methyl modified nucleotide
  modified_base 70: mod_base = OTHER; note = 2'-O-methyl modified nucleotide
  modified_base 71: mod_base = OTHER; note = 2'-O-methyl modified nucleotide
  modified_base 72: mod_base = OTHER; note = 2'-O-methyl modified nucleotide
  modified_base 73: mod_base = OTHER; note = 2'-O-methyl modified nucleotide
  modified_base 74: mod_base = OTHER; note = 2'-O-methyl modified nucleotide
  modified_base 75: mod_base = OTHER; note = 2'-O-methyl modified nucleotide
  modified_base 76: mod_base = OTHER; note = 2'-O-methyl modified nucleotide
  modified_base 77: mod_base = OTHER; note = 2'-O-methyl modified nucleotide
  modified_base 78: mod_base = OTHER; note = 2'-O-methyl modified nucleotide
  modified_base 79: mod_base = OTHER; note = 2'-O-methyl modified nucleotide
  modified_base 80: mod_base = OTHER; note = 2'-O-methyl modified nucleotide
  modified_base 81: mod_base = OTHER; note = 2'-O-methyl modified nucleotide
  modified_base 82: mod_base = OTHER; note = 2'-O-methyl modified nucleotide
  modified_base 83: mod_base = OTHER; note = 2'-O-methyl modified nucleotide
  modified_base 84: mod_base = OTHER; note = 2'-O-methyl modified nucleotide
  modified_base 85: mod_base = OTHER; note = 2'-O-methyl modified nucleotide
  modified_base 86: mod_base = OTHER; note = 2'-O-methyl modified nucleotide
  modified_base 87: mod_base = OTHER; note = 2'-O-methyl modified nucleotide
  modified_base 88: mod_base = OTHER; note = 2'-O-methyl modified nucleotide
  modified_base 89: mod_base = OTHER; note = 2'-O-methyl modified nucleotide
  modified_base 90: mod_base = OTHER; note = 2'-O-methyl modified nucleotide
  modified_base 91: mod_base = OTHER; note = 2'-O-methyl modified nucleotide
  modified_base 92: mod_base = OTHER; note = 2'-O-methyl modified nucleotide
  modified_base 93: mod_base = OTHER; note = 2'-O-methyl modified nucleotide
  modified_base 94: mod_base = OTHER; note = 2'-O-methyl modified nucleotide
  modified_base 95: mod_base = OTHER; note = 2'-O-methyl modified nucleotide
  modified_base 96: mod_base = OTHER; note = 2'-O-methyl modified nucleotide
  modified_base 97: mod_base = OTHER; note = 2'-O-methyl modified nucleotide with phosphorothioate linkage
  modified_base 98: mod_base = OTHER; note = 2'-O-methyl modified nucleotide with phosphorothioate linkage
  modified_base 99: mod_base = OTHER; note = 2'-O-methyl modified nucleotide with phosphorothioate linkage
  modified_base 100: mod_base = OTHER; note = 2'-O-methyl modified nucleotide

SEQ ID NO: 2031 - RNA, 100 nt, synthetic construct; identical to SEQ ID NO: 1031
  source 1..100: mol_type = other RNA
  modified_base 1: mod_base = OTHER; note = 2'-O-methyl modified nucleotide with phosphorothioate linkage
  modified_base 2: mod_base = OTHER; note = 2'-O-methyl modified nucleotide with phosphorothioate linkage
  modified_base 3: mod_base = OTHER; note = 2'-O-methyl modified nucleotide with phosphorothioate linkage
  modified_base 29: mod_base = OTHER; note = 2'-O-methyl modified nucleotide
  modified_base 30: mod_base = OTHER; note = 2'-O-methyl modified nucleotide
  modified_base 31: mod_base = OTHER; note = 2'-O-methyl modified nucleotide
  modified_base 32: mod_base = OTHER; note = 2'-O-methyl modified nucleotide
  modified_base 33: mod_base = OTHER; note = 2'-O-methyl modified nucleotide
  modified_base 34: mod_base = OTHER; note = 2'-O-methyl modified nucleotide
  modified_base 35: mod_base = OTHER; note = 2'-O-methyl modified nucleotide
  modified_base 36: mod_base = OTHER; note = 2'-O-methyl modified nucleotide
  modified_base 37: mod_base = OTHER; note = 2'-O-methyl modified nucleotide
  modified_base 38: mod_base = OTHER; note = 2'-O-methyl modified nucleotide
  modified_base 39: mod_base = OTHER; note = 2'-O-methyl modified nucleotide
  modified_base 40: mod_base = OTHER; note = 2'-O-methyl modified nucleotide
  modified_base 69: mod_base = OTHER; note = 2'-O-methyl modified nucleotide
  modified_base 70: mod_base = OTHER; note = 2'-O-methyl modified nucleotide
  modified_base 71: mod_base = OTHER; note = 2'-O-methyl modified nucleotide
  modified_base 72: mod_base = OTHER; note = 2'-O-methyl modified nucleotide
  modified_base 73: mod_base = OTHER; note = 2'-O-methyl modified nucleotide
  modified_base 74: mod_base = OTHER; note = 2'-O-methyl modified nucleotide
  modified_base 75: mod_base = OTHER; note = 2'-O-methyl modified nucleotide
  modified_base 76: mod_base = OTHER; note = 2'-O-methyl modified nucleotide
  modified_base 77: mod_base = OTHER; note = 2'-O-methyl modified nucleotide
  modified_base 78: mod_base = OTHER; note = 2'-O-methyl modified nucleotide
  modified_base 79: mod_base = OTHER; note = 2'-O-methyl modified nucleotide
  modified_base 80: mod_base = OTHER; note = 2'-O-methyl modified nucleotide
  modified_base 81: mod_base = OTHER; note = 2'-O-methyl modified nucleotide
  modified_base 82: mod_base = OTHER; note = 2'-O-methyl modified nucleotide
  modified_base 83: mod_base = OTHER; note = 2'-O-methyl modified nucleotide
  modified_base 84: mod_base = OTHER; note = 2'-O-methyl modified nucleotide
  modified_base 85: mod_base = OTHER; note = 2'-O-methyl modified nucleotide
  modified_base 86: mod_base = OTHER; note = 2'-O-methyl modified nucleotide
  modified_base 87: mod_base = OTHER; note = 2'-O-methyl modified nucleotide
  modified_base 88: mod_base = OTHER; note = 2'-O-methyl modified nucleotide
  modified_base 89: mod_base = OTHER; note = 2'-O-methyl modified nucleotide
  modified_base 90: mod_base = OTHER; note = 2'-O-methyl modified nucleotide
  modified_base 91: mod_base = OTHER; note = 2'-O-methyl modified nucleotide
  modified_base 92: mod_base = OTHER; note = 2'-O-methyl modified nucleotide
  modified_base 93: mod_base = OTHER; note = 2'-O-methyl modified nucleotide
  modified_base 94: mod_base = OTHER; note = 2'-O-methyl modified nucleotide
  modified_base 95: mod_base = OTHER; note = 2'-O-methyl modified nucleotide
  modified_base 96: mod_base = OTHER; note = 2'-O-methyl modified nucleotide
  modified_base 97: mod_base = OTHER; note = 2'-O-methyl modified nucleotide with phosphorothioate linkage
  modified_base 98: mod_base = OTHER; note = 2'-O-methyl modified nucleotide with phosphorothioate linkage
  modified_base 99: mod_base = OTHER; note = 2'-O-methyl modified nucleotide with phosphorothioate linkage
  modified_base 100: mod_base = OTHER; note = 2'-O-methyl modified nucleotide

SEQ ID NO: 2032 - RNA, 100 nt, synthetic construct; identical to SEQ ID NO: 1032
  source 1..100: mol_type = other RNA
  modified_base 1: mod_base = OTHER; note = 2'-O-methyl modified nucleotide with phosphorothioate linkage
  modified_base 2: mod_base = OTHER; note = 2'-O-methyl modified nucleotide with phosphorothioate linkage
  modified_base 3: mod_base = OTHER; note = 2'-O-methyl modified nucleotide with phosphorothioate linkage
  modified_base 29: mod_base = OTHER; note = 2'-O-methyl modified nucleotide
  modified_base 30: mod_base = OTHER; note = 2'-O-methyl modified nucleotide
  modified_base 31: mod_base = OTHER; note = 2'-O-methyl modified nucleotide
  modified_base 32: mod_base = OTHER; note = 2'-O-methyl modified nucleotide
  modified_base 33: mod_base = OTHER; note = 2'-O-methyl modified nucleotide
  modified_base 34: mod_base = OTHER; note = 2'-O-methyl modified nucleotide
  modified_base 35: mod_base = OTHER; note = 2'-O-methyl modified nucleotide
  modified_base 36: mod_base = OTHER; note = 2'-O-methyl modified nucleotide
  modified_base 37: mod_base = OTHER; note = 2'-O-methyl modified nucleotide
  modified_base 38: mod_base = OTHER; note = 2'-O-methyl modified nucleotide
  modified_base 39: mod_base = OTHER; note = 2'-O-methyl modified nucleotide
  modified_base 40: mod_base = OTHER; note = 2'-O-methyl modified nucleotide
  modified_base 69: mod_base = OTHER; note = 2'-O-methyl modified nucleotide
  modified_base 70: mod_base = OTHER; note = 2'-O-methyl modified nucleotide
  modified_base 71: mod_base = OTHER; note = 2'-O-methyl modified nucleotide
  modified_base 72: mod_base = OTHER; note = 2'-O-methyl modified nucleotide
  modified_base 73: mod_base = OTHER; note = 2'-O-methyl modified nucleotide
  modified_base 74: mod_base = OTHER; note = 2'-O-methyl modified nucleotide
  modified_base 75: mod_base = OTHER; note = 2'-O-methyl modified nucleotide
  modified_base 76: mod_base = OTHER; note = 2'-O-methyl modified nucleotide
  modified_base 77: mod_base = OTHER; note = 2'-O-methyl modified nucleotide
  modified_base 78: mod_base = OTHER; note = 2'-O-methyl modified nucleotide
  modified_base 79: mod_base = OTHER; note = 2'-O-methyl modified nucleotide
  modified_base 80: mod_base = OTHER; note = 2'-O-methyl modified nucleotide
  modified_base 81: mod_base = OTHER; note = 2'-O-methyl modified nucleotide
  modified_base 82: mod_base = OTHER; note = 2'-O-methyl modified nucleotide
  modified_base 83: mod_base = OTHER; note = 2'-O-methyl modified nucleotide
  modified_base 84: mod_base = OTHER; note = 2'-O-methyl modified nucleotide
  modified_base 85: mod_base = OTHER; note = 2'-O-methyl modified nucleotide
  modified_base 86: mod_base = OTHER; note = 2'-O-methyl modified nucleotide
  modified_base 87: mod_base = OTHER; note = 2'-O-methyl modified nucleotide
  modified_base 88: mod_base = OTHER; note = 2'-O-methyl modified nucleotide
  modified_base 89: mod_base = OTHER; note = 2'-O-methyl modified nucleotide
  modified_base 90: mod_base = OTHER; note = 2'-O-methyl modified nucleotide
  modified_base 91: mod_base = OTHER; note = 2'-O-methyl modified nucleotide
  modified_base 92: mod_base = OTHER; note = 2'-O-methyl modified nucleotide
  modified_base 93: mod_base = OTHER; note = 2'-O-methyl modified nucleotide
  modified_base 94: mod_base = OTHER; note = 2'-O-methyl modified nucleotide
  modified_base 95: mod_base = OTHER; note = 2'-O-methyl modified nucleotide
  modified_base 96: mod_base = OTHER; note = 2'-O-methyl modified nucleotide
  modified_base 97: mod_base = OTHER; note = 2'-O-methyl modified nucleotide with phosphorothioate linkage
  modified_base 98: mod_base = OTHER; note = 2'-O-methyl modified nucleotide with phosphorothioate linkage
  modified_base 99: mod_base = OTHER; note = 2'-O-methyl modified nucleotide with phosphorothioate linkage
  modified_base 100: mod_base = OTHER; note = 2'-O-methyl modified nucleotide

SEQ ID NO: 2033 - RNA, 100 nt, synthetic construct; identical to SEQ ID NO: 1033
  source 1..100: mol_type = other RNA
  modified_base 1: mod_base = OTHER; note = 2'-O-methyl modified nucleotide with phosphorothioate linkage
  modified_base 2: mod_base = OTHER; note = 2'-O-methyl modified nucleotide with phosphorothioate linkage
  modified_base 3: mod_base = OTHER; note = 2'-O-methyl modified nucleotide with phosphorothioate linkage
  modified_base 29: mod_base = OTHER; note = 2'-O-methyl modified nucleotide
  modified_base 30: mod_base = OTHER; note = 2'-O-methyl modified nucleotide
  modified_base 31: mod_base = OTHER; note = 2'-O-methyl modified nucleotide
  modified_base 32: mod_base = OTHER; note = 2'-O-methyl modified nucleotide
  modified_base 33: mod_base = OTHER; note = 2'-O-methyl modified nucleotide
  modified_base 34: mod_base = OTHER; note = 2'-O-methyl modified nucleotide
  modified_base 35: mod_base = OTHER; note = 2'-O-methyl modified nucleotide
  modified_base 36: mod_base = OTHER; note = 2'-O-methyl modified nucleotide
  modified_base 37: mod_base = OTHER; note = 2'-O-methyl modified nucleotide
  modified_base 38: mod_base = OTHER; note = 2'-O-methyl modified nucleotide
  modified_base 39: mod_base = OTHER; note = 2'-O-methyl modified nucleotide
  modified_base 40: mod_base = OTHER; note = 2'-O-methyl modified nucleotide
  modified_base 69: mod_base = OTHER; note = 2'-O-methyl modified nucleotide
  modified_base 70: mod_base = OTHER; note = 2'-O-methyl modified nucleotide
  modified_base 71: mod_base = OTHER; note = 2'-O-methyl modified nucleotide
  modified_base 72: mod_base = OTHER; note = 2'-O-methyl modified nucleotide
  modified_base 73: mod_base = OTHER; note = 2'-O-methyl modified nucleotide
  modified_base 74: mod_base = OTHER; note = 2'-O-methyl modified nucleotide
  modified_base 75: mod_base = OTHER; note = 2'-O-methyl modified nucleotide
  modified_base 76: mod_base = OTHER; note = 2'-O-methyl modified nucleotide
  modified_base 77: mod_base = OTHER; note = 2'-O-methyl modified nucleotide
  modified_base 78: mod_base = OTHER; note = 2'-O-methyl modified nucleotide
  modified_base 79: mod_base = OTHER; note = 2'-O-methyl modified nucleotide
  modified_base 80: mod_base = OTHER; note = 2'-O-methyl modified nucleotide
  modified_base 81: mod_base = OTHER; note = 2'-O-methyl modified nucleotide
  modified_base 82: mod_base = OTHER; note = 2'-O-methyl modified nucleotide
  modified_base 83: mod_base = OTHER; note = 2'-O-methyl modified nucleotide
  modified_base 84: mod_base = OTHER; note = 2'-O-methyl modified nucleotide
  modified_base 85: mod_base = OTHER; note = 2'-O-methyl modified nucleotide
  modified_base 86: mod_base = OTHER; note = 2'-O-methyl modified nucleotide
  modified_base 87: mod_base = OTHER; note = 2'-O-methyl modified nucleotide
  modified_base 88: mod_base = OTHER; note = 2'-O-methyl modified nucleotide
  modified_base 89: mod_base = OTHER; note = 2'-O-methyl modified nucleotide
  modified_base 90: mod_base = OTHER; note = 2'-O-methyl modified nucleotide
  modified_base 91: mod_base = OTHER; note = 2'-O-methyl modified nucleotide
  modified_base 92: mod_base = OTHER; note = 2'-O-methyl modified nucleotide
  modified_base 93: mod_base = OTHER; note = 2'-O-methyl modified nucleotide
  modified_base 94: mod_base = OTHER; note = 2'-O-methyl modified nucleotide
  modified_base 95: mod_base = OTHER; note = 2'-O-methyl modified nucleotide
  modified_base 96: mod_base = OTHER; note = 2'-O-methyl modified nucleotide
  modified_base 97: mod_base = OTHER; note = 2'-O-methyl modified nucleotide with phosphorothioate linkage
  modified_base 98: mod_base = OTHER; note = 2'-O-methyl modified nucleotide with phosphorothioate linkage
  modified_base 99: mod_base = OTHER; note = 2'-O-methyl modified nucleotide with phosphorothioate linkage
  modified_base 100: mod_base = OTHER; note = 2'-O-methyl modified nucleotide

SEQ ID NO: 2034 - RNA, 100 nt, synthetic construct; identical to SEQ ID NO: 1034
  source 1..100: mol_type = other RNA
  modified_base 1: mod_base = OTHER; note = 2'-O-methyl modified nucleotide with phosphorothioate linkage
  modified_base 2: mod_base = OTHER; note = 2'-O-methyl modified nucleotide with phosphorothioate linkage
  modified_base 3: mod_base = OTHER; note = 2'-O-methyl modified nucleotide with phosphorothioate linkage
  modified_base 29: mod_base = OTHER; note = 2'-O-methyl modified nucleotide
  modified_base 30: mod_base = OTHER; note = 2'-O-methyl modified nucleotide
  modified_base 31: mod_base = OTHER; note = 2'-O-methyl modified nucleotide
  modified_base 32: mod_base = OTHER; note = 2'-O-methyl modified nucleotide
  modified_base 33: mod_base = OTHER; note = 2'-O-methyl modified nucleotide
  modified_base 34: mod_base = OTHER; note = 2'-O-methyl modified nucleotide
  modified_base 35: mod_base = OTHER; note = 2'-O-methyl modified nucleotide
  modified_base 36: mod_base = OTHER; note = 2'-O-methyl modified nucleotide
  modified_base 37: mod_base = OTHER; note = 2'-O-methyl modified nucleotide
  modified_base 38: mod_base = OTHER; note = 2'-O-methyl modified nucleotide
  modified_base 39: mod_base = OTHER; note = 2'-O-methyl modified nucleotide
  modified_base 40: mod_base = OTHER; note = 2'-O-methyl modified nucleotide
  modified_base 69: mod_base = OTHER; note = 2'-O-methyl modified nucleotide
  modified_base 70: mod_base = OTHER; note = 2'-O-methyl modified nucleotide
  modified_base 71: mod_base = OTHER; note = 2'-O-methyl modified nucleotide
  modified_base 72: mod_base = OTHER; note = 2'-O-methyl modified nucleotide
  modified_base 73: mod_base = OTHER; note = 2'-O-methyl modified nucleotide
  modified_base 74: mod_base = OTHER; note = 2'-O-methyl modified nucleotide
  modified_base 75: mod_base = OTHER; note = 2'-O-methyl modified nucleotide
  modified_base 76: mod_base = OTHER; note = 2'-O-methyl modified nucleotide
  modified_base 77: mod_base = OTHER; note = 2'-O-methyl modified nucleotide
  modified_base 78: mod_base = OTHER; note = 2'-O-methyl modified nucleotide
  modified_base 79: mod_base = OTHER; note = 2'-O-methyl modified nucleotide
  modified_base 80: mod_base = OTHER; note = 2'-O-methyl modified nucleotide
  modified_base 81: mod_base = OTHER; note = 2'-O-methyl modified nucleotide
  modified_base 82: mod_base = OTHER; note = 2'-O-methyl modified nucleotide
  modified_base 83: mod_base = OTHER; note = 2'-O-methyl modified nucleotide
  modified_base 84: mod_base = OTHER; note = 2'-O-methyl modified nucleotide
  modified_base 85: mod_base = OTHER; note = 2'-O-methyl modified nucleotide
  modified_base 86: mod_base = OTHER; note = 2'-O-methyl modified nucleotide
  modified_base 87: mod_base = OTHER; note = 2'-O-methyl modified nucleotide
  modified_base 88: mod_base = OTHER; note = 2'-O-methyl modified nucleotide
  modified_base 89: mod_base = OTHER; note = 2'-O-methyl modified nucleotide
  modified_base 90: mod_base = OTHER; note = 2'-O-methyl modified nucleotide
  modified_base 91: mod_base = OTHER; note = 2'-O-methyl modified nucleotide
  modified_base 92: mod_base = OTHER; note = 2'-O-methyl modified nucleotide
  modified_base 93: mod_base = OTHER; note = 2'-O-methyl modified nucleotide
  modified_base 94: mod_base = OTHER; note = 2'-O-methyl modified nucleotide
  modified_base 95: mod_base = OTHER; note = 2'-O-methyl modified nucleotide
  modified_base 96: mod_base = OTHER; note = 2'-O-methyl modified nucleotide
  modified_base 97: mod_base = OTHER; note = 2'-O-methyl modified nucleotide with phosphorothioate linkage
  modified_base 98: mod_base = OTHER; note = 2'-O-methyl modified nucleotide with phosphorothioate linkage
  modified_base 99: mod_base = OTHER; note = 2'-O-methyl modified nucleotide with phosphorothioate linkage
  modified_base 100: mod_base = OTHER; note = 2'-O-methyl modified nucleotide

SEQ ID NO: 2035 - RNA, 100 nt, synthetic construct; identical to SEQ ID NO: 1035
  source 1..100: mol_type = other RNA
  modified_base 1: mod_base = OTHER; note = 2'-O-methyl modified nucleotide with phosphorothioate linkage
  modified_base 2: mod_base = OTHER; note = 2'-O-methyl modified nucleotide with phosphorothioate linkage
  modified_base 3: mod_base = OTHER; note = 2'-O-methyl modified nucleotide with phosphorothioate linkage
  modified_base 29: mod_base = OTHER; note = 2'-O-methyl modified nucleotide
  modified_base 30: mod_base = OTHER; note = 2'-O-methyl modified nucleotide
  modified_base 31: mod_base = OTHER; note = 2'-O-methyl modified nucleotide
  modified_base 32: mod_base = OTHER; note = 2'-O-methyl modified nucleotide
  modified_base 33: mod_base = OTHER; note = 2'-O-methyl modified nucleotide
  modified_base 34: mod_base = OTHER; note = 2'-O-methyl modified nucleotide
  modified_base 35: mod_base = OTHER; note = 2'-O-methyl modified nucleotide
  modified_base 36: mod_base = OTHER; note = 2'-O-methyl modified nucleotide
  modified_base 37: mod_base = OTHER; note = 2'-O-methyl modified nucleotide
  modified_base 38: mod_base = OTHER; note = 2'-O-methyl modified nucleotide
  modified_base 39: mod_base = OTHER; note = 2'-O-methyl modified nucleotide
  modified_base 40: mod_base = OTHER; note = 2'-O-methyl modified nucleotide
  modified_base 69: mod_base = OTHER; note = 2'-O-methyl modified nucleotide
  modified_base 70: mod_base = OTHER; note = 2'-O-methyl modified nucleotide
  modified_base 71: mod_base = OTHER; note = 2'-O-methyl modified nucleotide
  modified_base 72: mod_base = OTHER; note = 2'-O-methyl modified nucleotide
  modified_base 73: mod_base = OTHER; note = 2'-O-methyl modified nucleotide
  modified_base 74: mod_base = OTHER; note = 2'-O-methyl modified nucleotide
  modified_base 75: mod_base = OTHER; note = 2'-O-methyl modified nucleotide
  modified_base 76: mod_base = OTHER; note = 2'-O-methyl modified nucleotide
  modified_base 77: mod_base = OTHER; note = 2'-O-methyl modified nucleotide
  modified_base 78: mod_base = OTHER; note = 2'-O-methyl modified nucleotide
  modified_base 79: mod_base = OTHER; note = 2'-O-methyl modified nucleotide
  modified_base 80: mod_base = OTHER; note = 2'-O-methyl modified nucleotide
  modified_base 81: mod_base = OTHER; note = 2'-O-methyl modified nucleotide
  modified_base 82: mod_base = OTHER; note = 2'-O-methyl modified nucleotide
  modified_base 83: mod_base = OTHER; note = 2'-O-methyl modified nucleotide
  modified_base 84: mod_base = OTHER; note = 2'-O-methyl modified nucleotide
  modified_base 85: mod_base = OTHER; note = 2'-O-methyl modified nucleotide
  modified_base 86: mod_base = OTHER; note = 2'-O-methyl modified nucleotide
  modified_base 87: mod_base = OTHER; note = 2'-O-methyl modified nucleotide
  modified_base 88: mod_base = OTHER; note = 2'-O-methyl modified nucleotide
  modified_base 89: mod_base = OTHER; note = 2'-O-methyl modified nucleotide
  modified_base 90: mod_base = OTHER; note = 2'-O-methyl modified nucleotide
  modified_base 91: mod_base = OTHER; note = 2'-O-methyl modified nucleotide
  modified_base 92: mod_base = OTHER; note = 2'-O-methyl modified nucleotide
  modified_base 93: mod_base = OTHER; note = 2'-O-methyl modified nucleotide
  modified_base 94: mod_base = OTHER; note = 2'-O-methyl modified nucleotide
  modified_base 95: mod_base = OTHER; note = 2'-O-methyl modified nucleotide
  modified_base 96: mod_base = OTHER; note = 2'-O-methyl modified nucleotide
  modified_base 97: mod_base = OTHER; note = 2'-O-methyl modified nucleotide with phosphorothioate linkage
  modified_base 98: mod_base = OTHER; note = 2'-O-methyl modified nucleotide with phosphorothioate linkage
  modified_base 99: mod_base = OTHER; note = 2'-O-methyl modified nucleotide with phosphorothioate linkage
  modified_base 100: mod_base = OTHER; note = 2'-O-methyl modified nucleotide

SEQ ID NO: 2036 - RNA, 100 nt, synthetic construct; identical to SEQ ID NO: 1036
  source 1..100: mol_type = other RNA
  modified_base 1: mod_base = OTHER; note = 2'-O-methyl modified nucleotide with phosphorothioate linkage
  modified_base 2: mod_base = OTHER; note = 2'-O-methyl modified nucleotide with phosphorothioate linkage
  modified_base 3: mod_base = OTHER; note = 2'-O-methyl modified nucleotide with phosphorothioate linkage
  modified_base 29: mod_base = OTHER; note = 2'-O-methyl modified nucleotide
  modified_base 30: mod_base = OTHER; note = 2'-O-methyl modified nucleotide
  modified_base 31: mod_base = OTHER; note = 2'-O-methyl modified nucleotide
  modified_base 32: mod_base = OTHER; note = 2'-O-methyl modified nucleotide
  modified_base 33: mod_base = OTHER; note = 2'-O-methyl modified nucleotide
  modified_base 34: mod_base = OTHER; note = 2'-O-methyl modified nucleotide
  modified_base 35: mod_base = OTHER; note = 2'-O-methyl modified nucleotide
  modified_base 36: mod_base = OTHER; note = 2'-O-methyl modified nucleotide
  modified_base 37: mod_base = OTHER; note = 2'-O-methyl modified nucleotide
  modified_base 38: mod_base = OTHER; note = 2'-O-methyl modified nucleotide
  modified_base 39: mod_base = OTHER; note = 2'-O-methyl modified nucleotide
  modified_base 40: mod_base = OTHER; note = 2'-O-methyl modified nucleotide
  modified_base 69: mod_base = OTHER; note = 2'-O-methyl modified nucleotide
  modified_base 70: mod_base = OTHER; note = 2'-O-methyl modified nucleotide
  modified_base 71: mod_base = OTHER; note = 2'-O-methyl modified nucleotide
  modified_base 72: mod_base = OTHER; note = 2'-O-methyl modified nucleotide
  modified_base 73: mod_base = OTHER; note = 2'-O-methyl modified nucleotide
  modified_base 74: mod_base = OTHER; note = 2'-O-methyl modified nucleotide
  modified_base 75: mod_base = OTHER; note = 2'-O-methyl modified nucleotide
  modified_base 76: mod_base = OTHER; note = 2'-O-methyl modified nucleotide
  modified_base 77: mod_base = OTHER; note = 2'-O-methyl modified nucleotide
  modified_base 78: mod_base = OTHER; note = 2'-O-methyl modified nucleotide
  modified_base 79: mod_base = OTHER; note = 2'-O-methyl modified nucleotide
  modified_base 80: mod_base = OTHER; note = 2'-O-methyl modified nucleotide
  modified_base 81: mod_base = OTHER; note = 2'-O-methyl modified nucleotide
  modified_base 82: mod_base = OTHER; note = 2'-O-methyl modified nucleotide
  modified_base 83: mod_base = OTHER; note = 2'-O-methyl modified nucleotide
  modified_base 84: mod_base = OTHER; note = 2'-O-methyl modified nucleotide
  modified_base 85: mod_base = OTHER; note = 2'-O-methyl modified nucleotide
  modified_base 86: mod_base = OTHER; note = 2'-O-methyl modified nucleotide
  modified_base 87: mod_base = OTHER; note = 2'-O-methyl modified nucleotide
  modified_base 88: mod_base = OTHER; note = 2'-O-methyl modified nucleotide
  modified_base 89: mod_base = OTHER; note = 2'-O-methyl modified nucleotide
  modified_base 90: mod_base = OTHER; note = 2'-O-methyl modified nucleotide
  modified_base 91: mod_base = OTHER; note = 2'-O-methyl modified nucleotide
  modified_base 92: mod_base = OTHER; note = 2'-O-methyl modified nucleotide
  modified_base 93: mod_base = OTHER; note = 2'-O-methyl modified nucleotide
  modified_base 94: mod_base = OTHER; note = 2'-O-methyl modified nucleotide
  modified_base 95: mod_base = OTHER; note = 2'-O-methyl modified nucleotide
  modified_base 96: mod_base = OTHER; note = 2'-O-methyl modified nucleotide
  modified_base 97: mod_base = OTHER; note = 2'-O-methyl modified nucleotide with phosphorothioate linkage
  modified_base 98: mod_base = OTHER; note = 2'-O-methyl modified nucleotide with phosphorothioate linkage
  modified_base 99: mod_base = OTHER; note = 2'-O-methyl modified nucleotide with phosphorothioate linkage
  modified_base 100: mod_base = OTHER; note = 2'-O-methyl modified nucleotide

SEQ ID NO: 2037 - RNA, 100 nt, synthetic construct; identical to SEQ ID NO: 1037
  source 1..100: mol_type = other RNA
  modified_base 1: mod_base = OTHER; note = 2'-O-methyl modified nucleotide with phosphorothioate linkage
  modified_base 2: mod_base = OTHER; note = 2'-O-methyl modified nucleotide with phosphorothioate linkage
  modified_base 3: mod_base = OTHER; note = 2'-O-methyl modified nucleotide with phosphorothioate linkage
  modified_base 29: mod_base = OTHER; note = 2'-O-methyl modified nucleotide
  modified_base 30: mod_base = OTHER; note = 2'-O-methyl modified nucleotide
  modified_base 31: mod_base = OTHER; note = 2'-O-methyl modified nucleotide
  modified_base 32: mod_base = OTHER; note = 2'-O-methyl modified nucleotide
  modified_base 33: mod_base = OTHER; note = 2'-O-methyl modified nucleotide
  modified_base 34: mod_base = OTHER; note = 2'-O-methyl modified nucleotide
  modified_base 35: mod_base = OTHER; note = 2'-O-methyl modified nucleotide
  modified_base 36: mod_base = OTHER; note = 2'-O-methyl modified nucleotide
  modified_base 37: mod_base = OTHER; note = 2'-O-methyl modified nucleotide
  modified_base 38: mod_base = OTHER; note = 2'-O-methyl modified nucleotide
  modified_base 39: mod_base = OTHER; note = 2'-O-methyl modified nucleotide
  modified_base 40: mod_base = OTHER; note = 2'-O-methyl modified nucleotide
  modified_base 69: mod_base = OTHER; note = 2'-O-methyl modified nucleotide
  modified_base 70: mod_base = OTHER; note = 2'-O-methyl modified nucleotide
  modified_base 71: mod_base = OTHER; note = 2'-O-methyl modified nucleotide
  modified_base 72: mod_base = OTHER; note = 2'-O-methyl modified nucleotide
  modified_base 73: mod_base = OTHER; note = 2'-O-methyl modified nucleotide
  modified_base 74: mod_base = OTHER; note = 2'-O-methyl modified nucleotide
  modified_base 75: mod_base = OTHER; note = 2'-O-methyl modified nucleotide
  modified_base 76: mod_base = OTHER; note = 2'-O-methyl modified nucleotide
  modified_base 77: mod_base = OTHER; note = 2'-O-methyl modified nucleotide
  modified_base 78: mod_base = OTHER; note = 2'-O-methyl modified nucleotide
  modified_base 79: mod_base = OTHER; note = 2'-O-methyl modified nucleotide
  modified_base 80: mod_base = OTHER; note = 2'-O-methyl modified nucleotide
  modified_base 81: mod_base = OTHER; note = 2'-O-methyl modified nucleotide
  modified_base 82: mod_base = OTHER; note = 2'-O-methyl modified nucleotide
  modified_base 83: mod_base = OTHER; note = 2'-O-methyl modified nucleotide
  modified_base 84: mod_base = OTHER; note = 2'-O-methyl modified nucleotide
  modified_base 85: mod_base = OTHER; note = 2'-O-methyl modified nucleotide
  modified_base 86: mod_base = OTHER; note = 2'-O-methyl modified nucleotide
  modified_base 87: mod_base = OTHER; note = 2'-O-methyl modified nucleotide
  modified_base 88: mod_base = OTHER; note = 2'-O-methyl modified nucleotide
  modified_base 89: mod_base = OTHER; note = 2'-O-methyl modified nucleotide
  modified_base 90: mod_base = OTHER; note = 2'-O-methyl modified nucleotide
  modified_base 91: mod_base = OTHER; note = 2'-O-methyl modified nucleotide
  modified_base 92: mod_base = OTHER; note = 2'-O-methyl modified nucleotide
  modified_base 93: mod_base = OTHER; note = 2'-O-methyl modified nucleotide
  modified_base 94: mod_base = OTHER; note = 2'-O-methyl modified nucleotide
  modified_base 95: mod_base = OTHER; note = 2'-O-methyl modified nucleotide
  modified_base 96: mod_base = OTHER; note = 2'-O-methyl modified nucleotide
  modified_base 97: mod_base = OTHER; note = 2'-O-methyl modified nucleotide with phosphorothioate linkage
  modified_base 98: mod_base = OTHER; note = 2'-O-methyl modified nucleotide with phosphorothioate linkage
  modified_base 99: mod_base = OTHER; note = 2'-O-methyl modified nucleotide with phosphorothioate linkage
  modified_base 100: mod_base = OTHER; note = 2'-O-methyl modified nucleotide

SEQ ID NO: 2038 - RNA, 100 nt, synthetic construct; identical to SEQ ID NO: 1038
  source 1..100: mol_type = other RNA
  modified_base 1: mod_base = OTHER; note = 2'-O-methyl modified nucleotide with phosphorothioate linkage
  modified_base 2: mod_base = OTHER; note = 2'-O-methyl modified nucleotide with phosphorothioate linkage
  modified_base 3: mod_base = OTHER; note = 2'-O-methyl modified nucleotide with phosphorothioate linkage
  modified_base 29: mod_base = OTHER; note = 2'-O-methyl modified nucleotide
  modified_base 30: mod_base = OTHER; note = 2'-O-methyl modified nucleotide
  modified_base 31: mod_base = OTHER; note = 2'-O-methyl modified nucleotide
  modified_base 32: mod_base = OTHER; note = 2'-O-methyl modified nucleotide
  modified_base 33: mod_base = OTHER; note = 2'-O-methyl modified nucleotide
  modified_base 34: mod_base = OTHER; note = 2'-O-methyl modified nucleotide
  modified_base 35: mod_base = OTHER; note = 2'-O-methyl modified nucleotide
  modified_base 36: mod_base = OTHER; note = 2'-O-methyl modified nucleotide
  modified_base 37: mod_base = OTHER; note = 2'-O-methyl modified nucleotide
  modified_base 38: mod_base = OTHER; note = 2'-O-methyl modified nucleotide
  modified_base 39: mod_base = OTHER; note = 2'-O-methyl modified nucleotide
  modified_base 40: mod_base = OTHER; note = 2'-O-methyl modified nucleotide
  modified_base 69: mod_base = OTHER; note = 2'-O-methyl modified nucleotide
  modified_base 70: mod_base = OTHER; note = 2'-O-methyl modified nucleotide
  modified_base 71: mod_base = OTHER; note = 2'-O-methyl modified nucleotide
  modified_base 72: mod_base = OTHER; note = 2'-O-methyl modified nucleotide
  modified_base 73: mod_base = OTHER; note = 2'-O-methyl modified nucleotide
  modified_base 74: mod_base = OTHER; note = 2'-O-methyl modified nucleotide
  modified_base 75: mod_base = OTHER; note = 2'-O-methyl modified nucleotide
  modified_base 76: mod_base = OTHER; note = 2'-O-methyl modified nucleotide
  modified_base 77: mod_base = OTHER; note = 2'-O-methyl modified nucleotide
  modified_base 78: mod_base = OTHER; note = 2'-O-methyl modified nucleotide
  modified_base 79: mod_base = OTHER; note = 2'-O-methyl modified nucleotide
  modified_base 80: mod_base = OTHER; note = 2'-O-methyl modified nucleotide
  modified_base 81: mod_base = OTHER; note = 2'-O-methyl modified nucleotide
  modified_base 82: mod_base = OTHER; note = 2'-O-methyl modified nucleotide
  modified_base 83: mod_base = OTHER; note = 2'-O-methyl modified nucleotide
  modified_base 84: mod_base = OTHER; note = 2'-O-methyl modified nucleotide
  modified_base 85: mod_base = OTHER; note = 2'-O-methyl modified nucleotide
  modified_base 86: mod_base = OTHER; note = 2'-O-methyl modified nucleotide
  modified_base 87: mod_base = OTHER; note = 2'-O-methyl modified nucleotide
  modified_base 88: mod_base = OTHER; note = 2'-O-methyl modified nucleotide
  modified_base 89: mod_base = OTHER; note = 2'-O-methyl modified nucleotide
  modified_base 90: mod_base = OTHER; note = 2'-O-methyl modified nucleotide
  modified_base 91: mod_base = OTHER; note = 2'-O-methyl modified nucleotide
  modified_base 92: mod_base = OTHER; note = 2'-O-methyl modified nucleotide
  modified_base 93: mod_base = OTHER; note = 2'-O-methyl modified nucleotide
  modified_base 94: mod_base = OTHER; note = 2'-O-methyl modified nucleotide
  modified_base 95: mod_base = OTHER; note = 2'-O-methyl modified nucleotide
  modified_base 96: mod_base = OTHER; note = 2'-O-methyl modified nucleotide
  modified_base 97: mod_base = OTHER; note = 2'-O-methyl modified nucleotide with phosphorothioate linkage
  modified_base 98: mod_base = OTHER; note = 2'-O-methyl modified nucleotide with phosphorothioate linkage
  modified_base 99: mod_base = OTHER; note = 2'-O-methyl modified nucleotide with phosphorothioate linkage
  modified_base 100: mod_base = OTHER; note = 2'-O-methyl modified nucleotide

SEQ ID NO: 2039 - RNA, 100 nt, synthetic construct; identical to SEQ ID NO: 1039
  source 1..100: mol_type = other RNA
  modified_base 1: mod_base = OTHER; note = 2'-O-methyl modified nucleotide with phosphorothioate linkage
  modified_base 2: mod_base = OTHER; note = 2'-O-methyl modified nucleotide with phosphorothioate linkage
  modified_base 3: mod_base = OTHER; note = 2'-O-methyl modified nucleotide with phosphorothioate linkage
  modified_base 29: mod_base = OTHER; note = 2'-O-methyl modified nucleotide
  modified_base 30: mod_base = OTHER; note = 2'-O-methyl modified nucleotide
  modified_base 31: mod_base = OTHER; note = 2'-O-methyl modified nucleotide
  modified_base 32: mod_base = OTHER; note = 2'-O-methyl modified nucleotide
  modified_base 33: mod_base = OTHER; note = 2'-O-methyl modified nucleotide
  modified_base 34: mod_base = OTHER; note = 2'-O-methyl modified nucleotide
  modified_base 35: mod_base = OTHER; note = 2'-O-methyl modified nucleotide
  modified_base 36: mod_base = OTHER; note = 2'-O-methyl modified nucleotide
  modified_base 37: mod_base = OTHER; note = 2'-O-methyl modified nucleotide
  modified_base 38: mod_base = OTHER; note = 2'-O-methyl modified nucleotide
  modified_base 39: mod_base = OTHER; note = 2'-O-methyl modified nucleotide
  modified_base 40: mod_base = OTHER; note = 2'-O-methyl modified nucleotide
  modified_base 69: mod_base = OTHER; note = 2'-O-methyl modified nucleotide
  modified_base 70: mod_base = OTHER; note = 2'-O-methyl modified nucleotide
  modified_base 71: mod_base = OTHER; note = 2'-O-methyl modified nucleotide
  modified_base 72: mod_base = OTHER; note = 2'-O-methyl modified nucleotide
  modified_base 73: mod_base = OTHER; note = 2'-O-methyl modified nucleotide
  modified_base 74: mod_base = OTHER; note = 2'-O-methyl modified nucleotide
  modified_base 75: mod_base = OTHER; note = 2'-O-methyl modified nucleotide
  modified_base 76: mod_base = OTHER; note = 2'-O-methyl modified nucleotide
  modified_base 77: mod_base = OTHER; note = 2'-O-methyl modified nucleotide
  modified_base 78: mod_base = OTHER; note = 2'-O-methyl modified nucleotide
  modified_base 79: mod_base = OTHER; note = 2'-O-methyl modified nucleotide
  modified_base 80: mod_base = OTHER; note = 2'-O-methyl modified nucleotide
  modified_base 81: mod_base = OTHER; note = 2'-O-methyl modified nucleotide
  modified_base 82: mod_base = OTHER; note = 2'-O-methyl modified nucleotide
  modified_base 83: mod_base = OTHER; note = 2'-O-methyl modified nucleotide
  modified_base 84: mod_base = OTHER; note = 2'-O-methyl modified nucleotide
  modified_base 85: mod_base = OTHER; note = 2'-O-methyl modified nucleotide
  modified_base 86: mod_base = OTHER; note = 2'-O-methyl modified nucleotide
  modified_base 87: mod_base = OTHER; note = 2'-O-methyl modified nucleotide
  modified_base 88: mod_base = OTHER; note = 2'-O-methyl modified nucleotide
  modified_base 89: mod_base = OTHER; note = 2'-O-methyl modified nucleotide
  modified_base 90: mod_base = OTHER; note = 2'-O-methyl modified nucleotide
  modified_base 91: mod_base = OTHER; note = 2'-O-methyl modified nucleotide
  modified_base 92: mod_base = OTHER; note = 2'-O-methyl modified nucleotide
  modified_base 93: mod_base = OTHER; note = 2'-O-methyl modified nucleotide
  modified_base 94: mod_base = OTHER; note = 2'-O-methyl modified nucleotide
  modified_base 95: mod_base = OTHER; note = 2'-O-methyl modified nucleotide
  modified_base 96: mod_base = OTHER; note = 2'-O-methyl modified nucleotide
  modified_base 97: mod_base = OTHER; note = 2'-O-methyl modified nucleotide with phosphorothioate linkage
  modified_base 98: mod_base = OTHER; note = 2'-O-methyl modified nucleotide with phosphorothioate linkage
  modified_base 99: mod_base = OTHER; note = 2'-O-methyl modified nucleotide with phosphorothioate linkage
  modified_base 100: mod_base = OTHER; note = 2'-O-methyl modified nucleotide

SEQ ID NO: 2040 - RNA, 100 nt, synthetic construct; identical to SEQ ID NO: 1040
  source 1..100: mol_type = other RNA
  modified_base 1: mod_base = OTHER; note = 2'-O-methyl modified nucleotide with phosphorothioate linkage
  modified_base 2: mod_base = OTHER; note = 2'-O-methyl modified nucleotide with phosphorothioate linkage
  modified_base 3: mod_base = OTHER; note = 2'-O-methyl modified nucleotide with phosphorothioate linkage
  modified_base 29: mod_base = OTHER; note = 2'-O-methyl modified nucleotide
  modified_base 30: mod_base = OTHER; note = 2'-O-methyl modified nucleotide
  modified_base 31: mod_base = OTHER; note = 2'-O-methyl modified nucleotide
  modified_base 32: mod_base = OTHER; note = 2'-O-methyl modified nucleotide
  modified_base 33: mod_base = OTHER; note = 2'-O-methyl modified nucleotide
  modified_base 34: mod_base = OTHER; note = 2'-O-methyl modified nucleotide
  modified_base 35: mod_base = OTHER; note = 2'-O-methyl modified nucleotide
  modified_base 36: mod_base = OTHER; note = 2'-O-methyl modified nucleotide
  modified_base 37: mod_base = OTHER; note = 2'-O-methyl modified nucleotide
  modified_base 38: mod_base = OTHER; note = 2'-O-methyl modified nucleotide
  modified_base 39: mod_base = OTHER; note = 2'-O-methyl modified nucleotide
  modified_base 40: mod_base = OTHER; note = 2'-O-methyl modified nucleotide
  modified_base 69: mod_base = OTHER; note = 2'-O-methyl modified nucleotide
  modified_base 70: mod_base = OTHER; note = 2'-O-methyl modified nucleotide
  modified_base 71: mod_base = OTHER; note = 2'-O-methyl modified nucleotide
  modified_base 72: mod_base = OTHER; note = 2'-O-methyl modified nucleotide
  modified_base 73: mod_base = OTHER; note = 2'-O-methyl modified nucleotide
  modified_base 74: mod_base = OTHER; note = 2'-O-methyl modified nucleotide
  modified_base 75: mod_base = OTHER; note = 2'-O-methyl modified nucleotide
  modified_base 76: mod_base = OTHER; note = 2'-O-methyl modified nucleotide
  modified_base 77: mod_base = OTHER; note = 2'-O-methyl modified nucleotide
  modified_base 78: mod_base = OTHER; note = 2'-O-methyl modified nucleotide
  modified_base 79: mod_base = OTHER; note = 2'-O-methyl modified nucleotide
  modified_base 80: mod_base = OTHER; note = 2'-O-methyl modified nucleotide
  modified_base 81: mod_base = OTHER; note = 2'-O-methyl modified nucleotide
  modified_base 82: mod_base = OTHER; note = 2'-O-methyl modified nucleotide
  modified_base 83: mod_base = OTHER; note = 2'-O-methyl modified nucleotide
  modified_base 84: mod_base = OTHER; note = 2'-O-methyl modified nucleotide
  modified_base 85: mod_base = OTHER; note = 2'-O-methyl modified nucleotide
  modified_base 86: mod_base = OTHER; note = 2'-O-methyl modified nucleotide
  modified_base 87: mod_base = OTHER; note = 2'-O-methyl modified nucleotide
  modified_base 88: mod_base = OTHER; note = 2'-O-methyl modified nucleotide
  modified_base 89: mod_base = OTHER; note = 2'-O-methyl modified nucleotide
  modified_base 90: mod_base = OTHER; note = 2'-O-methyl modified nucleotide
  modified_base 91: mod_base = OTHER; note = 2'-O-methyl modified nucleotide
  modified_base 92: mod_base = OTHER; note = 2'-O-methyl modified nucleotide
  modified_base 93: mod_base = OTHER; note = 2'-O-methyl modified nucleotide
  modified_base 94: mod_base = OTHER; note = 2'-O-methyl modified nucleotide
  modified_base 95: mod_base = OTHER; note = 2'-O-methyl modified nucleotide
  modified_base 96: mod_base = OTHER; note = 2'-O-methyl modified nucleotide
  modified_base 97: mod_base = OTHER; note = 2'-O-methyl modified nucleotide with phosphorothioate linkage
  modified_base 98: mod_base = OTHER; note = 2'-O-methyl modified nucleotide with phosphorothioate linkage
  modified_base 99: mod_base = OTHER; note = 2'-O-methyl modified nucleotide with phosphorothioate linkage
  modified_base 100: mod_base = OTHER; note = 2'-O-methyl modified nucleotide

SEQ ID NO: 2041 - RNA, 100 nt, synthetic construct; identical to SEQ ID NO: 1041
  source 1..100: mol_type = other RNA
  modified_base 1: mod_base = OTHER; note = 2'-O-methyl modified nucleotide with phosphorothioate linkage
  modified_base 2: mod_base = OTHER; note = 2'-O-methyl modified nucleotide with phosphorothioate linkage
  modified_base 3: mod_base = OTHER; note = 2'-O-methyl modified nucleotide with phosphorothioate linkage
  modified_base 29: mod_base = OTHER; note = 2'-O-methyl modified nucleotide
  modified_base 30: mod_base = OTHER; note = 2'-O-methyl modified nucleotide
  modified_base 31: mod_base = OTHER; note = 2'-O-methyl modified nucleotide
  modified_base 32: mod_base = OTHER; note = 2'-O-methyl modified nucleotide
  modified_base 33: mod_base = OTHER; note = 2'-O-methyl modified nucleotide
  modified_base 34: mod_base = OTHER; note = 2'-O-methyl modified nucleotide
  modified_base 35: mod_base = OTHER; note = 2'-O-methyl modified nucleotide
  modified_base 36: mod_base = OTHER; note = 2'-O-methyl modified nucleotide
  modified_base 37: mod_base = OTHER; note = 2'-O-methyl modified nucleotide
  modified_base 38: mod_base = OTHER; note = 2'-O-methyl modified nucleotide
  modified_base 39: mod_base = OTHER; note = 2'-O-methyl modified nucleotide
  modified_base 40: mod_base = OTHER; note = 2'-O-methyl modified nucleotide
  modified_base 69: mod_base = OTHER; note = 2'-O-methyl modified nucleotide
  modified_base 70: mod_base = OTHER; note = 2'-O-methyl modified nucleotide
  modified_base 71: mod_base = OTHER; note = 2'-O-methyl modified nucleotide
  modified_base 72: mod_base = OTHER; note = 2'-O-methyl modified nucleotide
  modified_base 73: mod_base = OTHER; note = 2'-O-methyl modified nucleotide
  modified_base 74: mod_base = OTHER; note = 2'-O-methyl modified nucleotide
  modified_base 75: mod_base = OTHER; note = 2'-O-methyl modified nucleotide
  modified_base 76: mod_base = OTHER; note = 2'-O-methyl modified nucleotide
  modified_base 77: mod_base = OTHER; note = 2'-O-methyl modified nucleotide
  modified_base 78: mod_base = OTHER; note = 2'-O-methyl modified nucleotide
  modified_base 79: mod_base = OTHER; note = 2'-O-methyl modified nucleotide
  modified_base 80: mod_base = OTHER; note = 2'-O-methyl modified nucleotide
  modified_base 81: mod_base = OTHER; note = 2'-O-methyl modified nucleotide
  modified_base 82: mod_base = OTHER; note = 2'-O-methyl modified nucleotide
  modified_base 83: mod_base = OTHER; note = 2'-O-methyl modified nucleotide
  modified_base 84: mod_base = OTHER; note = 2'-O-methyl modified nucleotide
  modified_base 85: mod_base = OTHER; note = 2'-O-methyl modified nucleotide
  modified_base 86: mod_base = OTHER; note = 2'-O-methyl modified nucleotide
  modified_base 87: mod_base = OTHER; note = 2'-O-methyl modified nucleotide
  modified_base 88: mod_base = OTHER; note = 2'-O-methyl modified nucleotide
  modified_base 89: mod_base = OTHER; note = 2'-O-methyl modified nucleotide
  modified_base 90: mod_base = OTHER; note = 2'-O-methyl modified nucleotide
  modified_base 91: mod_base = OTHER; note = 2'-O-methyl modified nucleotide
  modified_base 92: mod_base = OTHER; note = 2'-O-methyl modified nucleotide
  modified_base 93: mod_base = OTHER; note = 2'-O-methyl modified nucleotide
  modified_base 94: mod_base = OTHER; note = 2'-O-methyl modified nucleotide
  modified_base 95: mod_base = OTHER; note = 2'-O-methyl modified nucleotide
  modified_base 96: mod_base = OTHER; note = 2'-O-methyl modified nucleotide
  modified_base 97: mod_base = OTHER; note = 2'-O-methyl modified nucleotide with phosphorothioate linkage
  modified_base 98: mod_base = OTHER; note = 2'-O-methyl modified nucleotide with phosphorothioate linkage
  modified_base 99: mod_base = OTHER; note = 2'-O-methyl modified nucleotide with phosphorothioate linkage
  modified_base 100: mod_base = OTHER; note = 2'-O-methyl modified nucleotide

SEQ ID NO: 2042 - RNA, 100 nt, synthetic construct; identical to SEQ ID NO: 1042
  source 1..100: mol_type = other RNA
  modified_base 1: mod_base = OTHER; note = 2'-O-methyl modified nucleotide with phosphorothioate linkage
  modified_base 2: mod_base = OTHER; note = 2'-O-methyl modified nucleotide with phosphorothioate linkage
  modified_base 3: mod_base = OTHER; note = 2'-O-methyl modified nucleotide with phosphorothioate linkage
  modified_base 29: mod_base = OTHER; note = 2'-O-methyl modified nucleotide
  modified_base 30: mod_base = OTHER; note = 2'-O-methyl modified nucleotide
  modified_base 31: mod_base = OTHER; note = 2'-O-methyl modified nucleotide
  modified_base 32: mod_base = OTHER; note = 2'-O-methyl modified nucleotide
  modified_base 33: mod_base = OTHER; note = 2'-O-methyl modified nucleotide
  modified_base 34: mod_base = OTHER; note = 2'-O-methyl modified nucleotide
  modified_base 35: mod_base = OTHER; note = 2'-O-methyl modified nucleotide
  modified_base 36: mod_base = OTHER; note = 2'-O-methyl modified nucleotide
  modified_base 37: mod_base = OTHER; note = 2'-O-methyl modified nucleotide
  modified_base 38: mod_base = OTHER; note = 2'-O-methyl modified nucleotide
  modified_base 39: mod_base = OTHER; note = 2'-O-methyl modified nucleotide
  modified_base 40: mod_base = OTHER; note = 2'-O-methyl modified nucleotide
  modified_base 69: mod_base = OTHER; note = 2'-O-methyl modified nucleotide
  modified_base 70: mod_base = OTHER; note = 2'-O-methyl modified nucleotide
  modified_base 71: mod_base = OTHER; note = 2'-O-methyl modified nucleotide
  modified_base 72: mod_base = OTHER; note = 2'-O-methyl modified nucleotide
  modified_base 73: mod_base = OTHER; note = 2'-O-methyl modified nucleotide
  modified_base 74: mod_base = OTHER; note = 2'-O-methyl modified nucleotide
  modified_base 75: mod_base = OTHER; note = 2'-O-methyl modified nucleotide
  modified_base 76: mod_base = OTHER; note = 2'-O-methyl modified nucleotide
  modified_base 77: mod_base = OTHER; note = 2'-O-methyl modified nucleotide
  modified_base 78: mod_base = OTHER; note = 2'-O-methyl modified nucleotide
  modified_base 79: mod_base = OTHER; note = 2'-O-methyl modified nucleotide
  modified_base 80: mod_base = OTHER; note = 2'-O-methyl modified nucleotide
  modified_base 81: mod_base = OTHER; note = 2'-O-methyl modified nucleotide
  modified_base 82: mod_base = OTHER; note = 2'-O-methyl modified nucleotide
  modified_base 83: mod_base = OTHER; note = 2'-O-methyl modified nucleotide
  modified_base 84: mod_base = OTHER; note = 2'-O-methyl modified nucleotide
  modified_base 85: mod_base = OTHER; note = 2'-O-methyl modified nucleotide
  modified_base 86: mod_base = OTHER; note = 2'-O-methyl modified nucleotide
  modified_base 87: mod_base = OTHER; note = 2'-O-methyl modified nucleotide
  modified_base 88: mod_base = OTHER; note = 2'-O-methyl modified nucleotide
  modified_base 89: mod_base = OTHER; note = 2'-O-methyl modified nucleotide
  modified_base 90: mod_base = OTHER; note = 2'-O-methyl modified nucleotide
  modified_base 91: mod_base = OTHER; note = 2'-O-methyl modified nucleotide
  modified_base 92: mod_base = OTHER; note = 2'-O-methyl modified nucleotide
  modified_base 93: mod_base = OTHER; note = 2'-O-methyl modified nucleotide
  modified_base 94: mod_base = OTHER; note = 2'-O-methyl modified nucleotide
  modified_base 95: mod_base = OTHER; note = 2'-O-methyl modified nucleotide
  modified_base 96: mod_base = OTHER; note = 2'-O-methyl modified nucleotide
  modified_base 97: mod_base = OTHER; note = 2'-O-methyl modified nucleotide with phosphorothioate linkage
  modified_base 98: mod_base = OTHER; note = 2'-O-methyl modified nucleotide with phosphorothioate linkage
  modified_base 99: mod_base = OTHER; note = 2'-O-methyl modified nucleotide with phosphorothioate linkage
  modified_base 100: mod_base = OTHER; note = 2'-O-methyl modified nucleotide

SEQ ID NO: 2043 - RNA, 100 nt, synthetic construct; identical to SEQ ID NO: 1043
  source 1..100: mol_type = other RNA
  modified_base 1: mod_base = OTHER; note = 2'-O-methyl modified nucleotide with phosphorothioate linkage
  modified_base 2: mod_base = OTHER; note = 2'-O-methyl modified nucleotide with phosphorothioate linkage
  modified_base 3: mod_base = OTHER; note = 2'-O-methyl modified nucleotide with phosphorothioate linkage
  modified_base 29: mod_base = OTHER; note = 2'-O-methyl modified nucleotide
  modified_base 30: mod_base = OTHER; note = 2'-O-methyl modified nucleotide
  modified_base 31: mod_base = OTHER; note = 2'-O-methyl modified nucleotide
  modified_base 32: mod_base = OTHER; note = 2'-O-methyl modified nucleotide
  modified_base 33: mod_base = OTHER; note = 2'-O-methyl modified nucleotide
  modified_base 34: mod_base = OTHER; note = 2'-O-methyl modified nucleotide
  modified_base 35: mod_base = OTHER; note = 2'-O-methyl modified nucleotide
  modified_base 36: mod_base = OTHER; note = 2'-O-methyl modified nucleotide
  modified_base 37: mod_base = OTHER; note = 2'-O-methyl modified nucleotide
  modified_base 38: mod_base = OTHER; note = 2'-O-methyl modified nucleotide
  modified_base 39: mod_base = OTHER; note = 2'-O-methyl modified nucleotide
  modified_base 40: mod_base = OTHER; note = 2'-O-methyl modified nucleotide
  modified_base 69: mod_base = OTHER; note = 2'-O-methyl modified nucleotide
  modified_base 70: mod_base = OTHER; note = 2'-O-methyl modified nucleotide
  modified_base 71: mod_base = OTHER; note = 2'-O-methyl modified nucleotide
  modified_base 72: mod_base = OTHER; note = 2'-O-methyl modified nucleotide
  modified_base 73: mod_base = OTHER; note = 2'-O-methyl modified nucleotide
  modified_base 74: mod_base = OTHER; note = 2'-O-methyl modified nucleotide
  modified_base 75: mod_base = OTHER; note = 2'-O-methyl modified nucleotide
  modified_base 76: mod_base = OTHER; note = 2'-O-methyl modified nucleotide
  modified_base 77: mod_base = OTHER; note = 2'-O-methyl modified nucleotide
  modified_base 78: mod_base = OTHER; note = 2'-O-methyl modified nucleotide
  modified_base 79: mod_base = OTHER; note = 2'-O-methyl modified nucleotide
  modified_base 80: mod_base = OTHER; note = 2'-O-methyl modified nucleotide
  modified_base 81: mod_base = OTHER; note = 2'-O-methyl modified nucleotide
  modified_base 82: mod_base = OTHER; note = 2'-O-methyl modified nucleotide
  modified_base 83: mod_base = OTHER; note = 2'-O-methyl modified nucleotide
  modified_base 84: mod_base = OTHER; note = 2'-O-methyl modified nucleotide
  modified_base 85: mod_base = OTHER; note = 2'-O-methyl modified nucleotide
  modified_base 86: mod_base = OTHER; note = 2'-O-methyl modified nucleotide
  modified_base 87: mod_base = OTHER; note = 2'-O-methyl modified nucleotide
  modified_base 88: mod_base = OTHER; note = 2'-O-methyl modified nucleotide
  modified_base 89: mod_base = OTHER; note = 2'-O-methyl modified nucleotide
  modified_base 90: mod_base = OTHER; note = 2'-O-methyl modified nucleotide
  modified_base 91: mod_base = OTHER; note = 2'-O-methyl modified nucleotide
  modified_base 92: mod_base = OTHER; note = 2'-O-methyl modified nucleotide
  modified_base 93: mod_base = OTHER; note = 2'-O-methyl modified nucleotide
  modified_base 94: mod_base = OTHER; note = 2'-O-methyl modified nucleotide
  modified_base 95: mod_base = OTHER; note = 2'-O-methyl modified nucleotide
  modified_base 96: mod_base = OTHER; note = 2'-O-methyl modified nucleotide
  modified_base 97: mod_base = OTHER; note = 2'-O-methyl modified nucleotide with phosphorothioate linkage
  modified_base 98: mod_base = OTHER; note = 2'-O-methyl modified nucleotide with phosphorothioate linkage
  modified_base 99: mod_base = OTHER; note = 2'-O-methyl modified nucleotide with phosphorothioate linkage
  modified_base 100: mod_base = OTHER; note = 2'-O-methyl modified nucleotide

SEQ ID NO: 2044 - RNA, 100 nt, synthetic construct; identical to SEQ ID NO: 1044
  source 1..100: mol_type = other RNA
  modified_base 1: mod_base = OTHER; note = 2'-O-methyl modified nucleotide with phosphorothioate linkage
  modified_base 2: mod_base = OTHER; note = 2'-O-methyl modified nucleotide with phosphorothioate linkage
  modified_base 3: mod_base = OTHER; note = 2'-O-methyl modified nucleotide with phosphorothioate linkage
  modified_base 29: mod_base = OTHER; note = 2'-O-methyl modified nucleotide
  modified_base 30: mod_base = OTHER; note = 2'-O-methyl modified nucleotide
  modified_base 31: mod_base = OTHER; note = 2'-O-methyl modified nucleotide
  modified_base 32: mod_base = OTHER; note = 2'-O-methyl modified nucleotide
  modified_base 33: mod_base = OTHER; note = 2'-O-methyl modified nucleotide
  modified_base 34: mod_base = OTHER; note = 2'-O-methyl modified nucleotide
  modified_base 35: mod_base = OTHER; note = 2'-O-methyl modified nucleotide
  modified_base 36: mod_base = OTHER; note = 2'-O-methyl modified nucleotide
  modified_base 37: mod_base = OTHER; note = 2'-O-methyl modified nucleotide
  modified_base 38: mod_base = OTHER; note = 2'-O-methyl modified nucleotide
  modified_base 39: mod_base = OTHER; note = 2'-O-methyl modified nucleotide
  modified_base 40: mod_base = OTHER; note = 2'-O-methyl modified nucleotide
  modified_base 69: mod_base = OTHER; note = 2'-O-methyl modified nucleotide
  modified_base 70: mod_base = OTHER; note = 2'-O-methyl modified nucleotide
  modified_base 71: mod_base = OTHER; note = 2'-O-methyl modified nucleotide
  modified_base 72: mod_base = OTHER; note = 2'-O-methyl modified nucleotide
  modified_base 73: mod_base = OTHER; note = 2'-O-methyl modified nucleotide
  modified_base 74: mod_base = OTHER; note = 2'-O-methyl modified nucleotide
  modified_base 75: mod_base = OTHER; note = 2'-O-methyl modified nucleotide
  modified_base 76: mod_base = OTHER; note = 2'-O-methyl modified nucleotide
  modified_base 77: mod_base = OTHER; note = 2'-O-methyl modified nucleotide
  modified_base 78: mod_base = OTHER; note = 2'-O-methyl modified nucleotide
  modified_base 79: mod_base = OTHER; note = 2'-O-methyl modified nucleotide
  modified_base 80: mod_base = OTHER; note = 2'-O-methyl modified nucleotide
  modified_base 81: mod_base = OTHER; note = 2'-O-methyl modified nucleotide
  modified_base 82: mod_base = OTHER; note = 2'-O-methyl modified nucleotide
  modified_base 83: mod_base = OTHER; note = 2'-O-methyl modified nucleotide
  modified_base 84: mod_base = OTHER; note = 2'-O-methyl modified nucleotide
  modified_base 85: mod_base = OTHER; note = 2'-O-methyl modified nucleotide
  modified_base 86: mod_base = OTHER; note = 2'-O-methyl modified nucleotide
  modified_base 87: mod_base = OTHER; note = 2'-O-methyl modified nucleotide
  modified_base 88: mod_base = OTHER; note = 2'-O-methyl modified nucleotide
  modified_base 89: mod_base = OTHER; note = 2'-O-methyl modified nucleotide
  modified_base 90: mod_base = OTHER; note = 2'-O-methyl modified nucleotide
  modified_base 91: mod_base = OTHER; note = 2'-O-methyl modified nucleotide
  modified_base 92: mod_base = OTHER; note = 2'-O-methyl modified nucleotide
  modified_base 93: mod_base = OTHER; note = 2'-O-methyl modified nucleotide
  modified_base 94: mod_base = OTHER; note = 2'-O-methyl modified nucleotide
  modified_base 95: mod_base = OTHER; note = 2'-O-methyl modified nucleotide
  modified_base 96: mod_base = OTHER; note = 2'-O-methyl modified nucleotide
  modified_base 97: mod_base = OTHER; note = 2'-O-methyl modified nucleotide with phosphorothioate linkage
  modified_base 98: mod_base = OTHER; note = 2'-O-methyl modified nucleotide with phosphorothioate linkage
  modified_base 99: mod_base = OTHER; note = 2'-O-methyl modified nucleotide with phosphorothioate linkage
  modified_base 100: mod_base = OTHER; note = 2'-O-methyl modified nucleotide

SEQ ID NO: 2045 - RNA, 100 nt, synthetic construct; identical to SEQ ID NO: 1045
  source 1..100: mol_type = other RNA
  modified_base 1: mod_base = OTHER; note = 2'-O-methyl modified nucleotide with phosphorothioate linkage
  modified_base 2: mod_base = OTHER; note = 2'-O-methyl modified nucleotide with phosphorothioate linkage
  modified_base 3: mod_base = OTHER; note = 2'-O-methyl modified nucleotide with phosphorothioate linkage
  modified_base 29: mod_base = OTHER; note = 2'-O-methyl modified nucleotide
  modified_base 30: mod_base = OTHER; note = 2'-O-methyl modified nucleotide
  modified_base 31: mod_base = OTHER; note = 2'-O-methyl modified nucleotide
  modified_base 32: mod_base = OTHER; note = 2'-O-methyl modified nucleotide
  modified_base 33: mod_base = OTHER; note = 2'-O-methyl modified nucleotide
  modified_base 34: mod_base = OTHER; note = 2'-O-methyl modified nucleotide
  modified_base 35: mod_base = OTHER; note = 2'-O-methyl modified nucleotide
  modified_base 36: mod_base = OTHER; note = 2'-O-methyl modified nucleotide
  modified_base 37: mod_base = OTHER; note = 2'-O-methyl modified nucleotide
  modified_base 38: mod_base = OTHER; note = 2'-O-methyl modified nucleotide
  modified_base 39: mod_base = OTHER; note = 2'-O-methyl modified nucleotide
  modified_base 40: mod_base = OTHER; note = 2'-O-methyl modified nucleotide
  modified_base 69: mod_base = OTHER; note = 2'-O-methyl modified nucleotide
  modified_base 70: mod_base = OTHER; note = 2'-O-methyl modified nucleotide
  modified_base 71: mod_base = OTHER; note = 2'-O-methyl modified nucleotide
  modified_base 72: mod_base = OTHER; note = 2'-O-methyl modified nucleotide
  modified_base 73: mod_base = OTHER; note = 2'-O-methyl modified nucleotide
  modified_base 74: mod_base = OTHER; note = 2'-O-methyl modified nucleotide
  modified_base 75: mod_base = OTHER; note = 2'-O-methyl modified nucleotide
  modified_base 76: mod_base = OTHER; note = 2'-O-methyl modified nucleotide
  modified_base 77: mod_base = OTHER; note = 2'-O-methyl modified nucleotide
  modified_base 78: mod_base = OTHER; note = 2'-O-methyl modified nucleotide
  modified_base 79: mod_base = OTHER; note = 2'-O-methyl modified nucleotide
  modified_base 80: mod_base = OTHER; note = 2'-O-methyl modified nucleotide
  modified_base 81: mod_base = OTHER; note = 2'-O-methyl modified nucleotide
  modified_base 82: mod_base = OTHER; note = 2'-O-methyl modified nucleotide
  modified_base 83: mod_base = OTHER; note = 2'-O-methyl modified nucleotide
  modified_base 84: mod_base = OTHER; note = 2'-O-methyl modified nucleotide
  modified_base 85: mod_base = OTHER; note = 2'-O-methyl modified nucleotide
  modified_base 86: mod_base = OTHER; note = 2'-O-methyl modified nucleotide
  modified_base 87: mod_base = OTHER; note = 2'-O-methyl modified nucleotide
  modified_base 88: mod_base = OTHER; note = 2'-O-methyl modified nucleotide
  modified_base 89: mod_base = OTHER; note = 2'-O-methyl modified nucleotide
  modified_base 90: mod_base = OTHER; note = 2'-O-methyl modified nucleotide
  modified_base 91: mod_base = OTHER; note = 2'-O-methyl modified nucleotide
  modified_base 92: mod_base = OTHER; note = 2'-O-methyl modified nucleotide
  modified_base 93: mod_base = OTHER; note = 2'-O-methyl modified nucleotide
  modified_base 94: mod_base = OTHER; note = 2'-O-methyl modified nucleotide
  modified_base 95: mod_base = OTHER; note = 2'-O-methyl modified nucleotide
  modified_base 96: mod_base = OTHER; note = 2'-O-methyl modified nucleotide
  modified_base 97: mod_base = OTHER; note = 2'-O-methyl modified nucleotide with phosphorothioate linkage
  modified_base 98: mod_base = OTHER; note = 2'-O-methyl modified nucleotide with phosphorothioate linkage
  modified_base 99: mod_base = OTHER; note = 2'-O-methyl modified nucleotide with phosphorothioate linkage
  modified_base 100: mod_base = OTHER; note = 2'-O-methyl modified nucleotide

SEQ ID NO: 2046 - RNA, 100 nt, synthetic construct; identical to SEQ ID NO: 1046
  source 1..100: mol_type = other RNA
  modified_base 1: mod_base = OTHER; note = 2'-O-methyl modified nucleotide with phosphorothioate linkage
  modified_base 2: mod_base = OTHER; note = 2'-O-methyl modified nucleotide with phosphorothioate linkage
  modified_base 3: mod_base = OTHER; note = 2'-O-methyl modified nucleotide with phosphorothioate linkage
  modified_base 29: mod_base = OTHER; note = 2'-O-methyl modified nucleotide
  modified_base 30: mod_base = OTHER; note = 2'-O-methyl modified nucleotide
  modified_base 31: mod_base = OTHER; note = 2'-O-methyl modified nucleotide
  modified_base 32: mod_base = OTHER; note = 2'-O-methyl modified nucleotide
  modified_base 33: mod_base = OTHER; note = 2'-O-methyl modified nucleotide
  modified_base 34: mod_base = OTHER; note = 2'-O-methyl modified nucleotide
  modified_base 35: mod_base = OTHER; note = 2'-O-methyl modified nucleotide
  modified_base 36: mod_base = OTHER; note = 2'-O-methyl modified nucleotide
  modified_base 37: mod_base = OTHER; note = 2'-O-methyl modified nucleotide
  modified_base 38: mod_base = OTHER; note = 2'-O-methyl modified nucleotide
  modified_base 39: mod_base = OTHER; note = 2'-O-methyl modified nucleotide
  modified_base 40: mod_base = OTHER; note = 2'-O-methyl modified nucleotide
  modified_base 69: mod_base = OTHER; note = 2'-O-methyl modified nucleotide
  modified_base 70: mod_base = OTHER; note = 2'-O-methyl modified nucleotide
  modified_base 71: mod_base = OTHER; note = 2'-O-methyl modified nucleotide
  modified_base 72: mod_base = OTHER; note = 2'-O-methyl modified nucleotide
  modified_base 73: mod_base = OTHER; note = 2'-O-methyl modified nucleotide
  modified_base 74: mod_base = OTHER; note = 2'-O-methyl modified nucleotide
  modified_base 75: mod_base = OTHER; note = 2'-O-methyl modified nucleotide
  modified_base 76: mod_base = OTHER; note = 2'-O-methyl modified nucleotide
  modified_base 77: mod_base = OTHER; note = 2'-O-methyl modified nucleotide
  modified_base 78: mod_base = OTHER; note = 2'-O-methyl modified nucleotide
  modified_base 79: mod_base = OTHER; note = 2'-O-methyl modified nucleotide
  modified_base 80: mod_base = OTHER; note = 2'-O-methyl modified nucleotide
  modified_base 81: mod_base = OTHER; note = 2'-O-methyl modified nucleotide
  modified_base 82: mod_base = OTHER; note = 2'-O-methyl modified nucleotide
  modified_base 83: mod_base = OTHER; note = 2'-O-methyl modified nucleotide
  modified_base 84: mod_base = OTHER; note = 2'-O-methyl modified nucleotide
  modified_base 85: mod_base = OTHER; note = 2'-O-methyl modified nucleotide
  modified_base 86: mod_base = OTHER; note = 2'-O-methyl modified nucleotide
  modified_base 87: mod_base = OTHER; note = 2'-O-methyl modified nucleotide
  modified_base 88: mod_base = OTHER; note = 2'-O-methyl modified nucleotide
  modified_base 89: mod_base = OTHER; note = 2'-O-methyl modified nucleotide
  modified_base 90: mod_base = OTHER; note = 2'-O-methyl modified nucleotide
  modified_base 91: mod_base = OTHER; note = 2'-O-methyl modified nucleotide
  modified_base 92: mod_base = OTHER; note = 2'-O-methyl modified nucleotide
  modified_base 93: mod_base = OTHER; note = 2'-O-methyl modified nucleotide
  modified_base 94: mod_base = OTHER; note = 2'-O-methyl modified nucleotide
  modified_base 95: mod_base = OTHER; note = 2'-O-methyl modified nucleotide
  modified_base 96: mod_base = OTHER; note = 2'-O-methyl modified nucleotide
  modified_base 97: mod_base = OTHER; note = 2'-O-methyl modified nucleotide with phosphorothioate linkage
  modified_base 98: mod_base = OTHER; note = 2'-O-methyl modified nucleotide with phosphorothioate linkage
  modified_base 99: mod_base = OTHER; note = 2'-O-methyl modified nucleotide with phosphorothioate linkage
  modified_base 100: mod_base = OTHER; note = 2'-O-methyl modified nucleotide

SEQ ID NO: 2047 - RNA, 100 nt, synthetic construct; identical to SEQ ID NO: 1047
  source 1..100: mol_type = other RNA
  modified_base 1: mod_base = OTHER; note = 2'-O-methyl modified nucleotide with phosphorothioate linkage
  modified_base 2: mod_base = OTHER; note = 2'-O-methyl modified nucleotide with phosphorothioate linkage
  modified_base 3: mod_base = OTHER; note = 2'-O-methyl modified nucleotide with phosphorothioate linkage
  modified_base 29: mod_base = OTHER; note = 2'-O-methyl modified nucleotide
  modified_base 30: mod_base = OTHER; note = 2'-O-methyl modified nucleotide
  modified_base 31: mod_base = OTHER; note = 2'-O-methyl modified nucleotide
  modified_base 32: mod_base = OTHER; note = 2'-O-methyl modified nucleotide
  modified_base 33: mod_base = OTHER; note = 2'-O-methyl modified nucleotide
  modified_base 34: mod_base = OTHER; note = 2'-O-methyl modified nucleotide
  modified_base 35: mod_base = OTHER; note = 2'-O-methyl modified nucleotide
  modified_base 36: mod_base = OTHER; note = 2'-O-methyl modified nucleotide
  modified_base 37: mod_base = OTHER; note = 2'-O-methyl modified nucleotide
  modified_base 38: mod_base = OTHER; note = 2'-O-methyl modified nucleotide
  modified_base 39: mod_base = OTHER; note = 2'-O-methyl modified nucleotide
  modified_base 40: mod_base = OTHER; note = 2'-O-methyl modified nucleotide
  modified_base 69: mod_base = OTHER; note = 2'-O-methyl modified nucleotide
  modified_base 70: mod_base = OTHER; note = 2'-O-methyl modified nucleotide
  modified_base 71: mod_base = OTHER; note = 2'-O-methyl modified nucleotide
  modified_base 72: mod_base = OTHER; note = 2'-O-methyl modified nucleotide
  modified_base 73: mod_base = OTHER; note = 2'-O-methyl modified nucleotide
  modified_base 74: mod_base = OTHER; note = 2'-O-methyl modified nucleotide
  modified_base 75: mod_base = OTHER; note = 2'-O-methyl modified nucleotide
  modified_base 76: mod_base = OTHER; note = 2'-O-methyl modified nucleotide
  modified_base 77: mod_base = OTHER; note = 2'-O-methyl modified nucleotide
  modified_base 78: mod_base = OTHER; note = 2'-O-methyl modified nucleotide
  modified_base 79: mod_base = OTHER; note = 2'-O-methyl modified nucleotide
  modified_base 80: mod_base = OTHER; note = 2'-O-methyl modified nucleotide
  modified_base 81: mod_base = OTHER; note = 2'-O-methyl modified nucleotide
  modified_base 82: mod_base = OTHER; note = 2'-O-methyl modified nucleotide
  modified_base 83: mod_base = OTHER; note = 2'-O-methyl modified nucleotide
  modified_base 84: mod_base = OTHER; note = 2'-O-methyl modified nucleotide
  modified_base 85: mod_base = OTHER; note = 2'-O-methyl modified nucleotide
  modified_base 86: mod_base = OTHER; note = 2'-O-methyl modified nucleotide
  modified_base 87: mod_base = OTHER; note = 2'-O-methyl modified nucleotide
  modified_base 88: mod_base = OTHER; note = 2'-O-methyl modified nucleotide
  modified_base 89: mod_base = OTHER; note = 2'-O-methyl modified nucleotide
  modified_base 90: mod_base = OTHER; note = 2'-O-methyl modified nucleotide
  modified_base 91: mod_base = OTHER; note = 2'-O-methyl modified nucleotide
  modified_base 92: mod_base = OTHER; note = 2'-O-methyl modified nucleotide
  modified_base 93: mod_base = OTHER; note = 2'-O-methyl modified nucleotide
  modified_base 94: mod_base = OTHER; note = 2'-O-methyl modified nucleotide
  modified_base 95: mod_base = OTHER; note = 2'-O-methyl modified nucleotide
  modified_base 96: mod_base = OTHER; note = 2'-O-methyl modified nucleotide
  modified_base 97: mod_base = OTHER; note = 2'-O-methyl modified nucleotide with phosphorothioate linkage
  modified_base 98: mod_base = OTHER; note = 2'-O-methyl modified nucleotide with phosphorothioate linkage
  modified_base 99: mod_base = OTHER; note = 2'-O-methyl modified nucleotide with phosphorothioate linkage
  modified_base 100: mod_base = OTHER; note = 2'-O-methyl modified nucleotide

SEQ ID NO: 2048 - RNA, 100 nt, synthetic construct; identical to SEQ ID NO: 1048
  source 1..100: mol_type = other RNA
  modified_base 1: mod_base = OTHER; note = 2'-O-methyl modified nucleotide with phosphorothioate linkage
  modified_base 2: mod_base = OTHER; note = 2'-O-methyl modified nucleotide with phosphorothioate linkage
  modified_base 3: mod_base = OTHER; note = 2'-O-methyl modified nucleotide with phosphorothioate linkage
  modified_base 29: mod_base = OTHER; note = 2'-O-methyl modified nucleotide
  modified_base 30: mod_base = OTHER; note = 2'-O-methyl modified nucleotide
  modified_base 31: mod_base = OTHER; note = 2'-O-methyl modified nucleotide
  modified_base 32: mod_base = OTHER; note = 2'-O-methyl modified nucleotide
  modified_base 33: mod_base = OTHER; note = 2'-O-methyl modified nucleotide
  modified_base 34: mod_base = OTHER; note = 2'-O-methyl modified nucleotide
  modified_base 35: mod_base = OTHER; note = 2'-O-methyl modified nucleotide
  modified_base 36: mod_base = OTHER; note = 2'-O-methyl modified nucleotide
  modified_base 37: mod_base = OTHER; note = 2'-O-methyl modified nucleotide
  modified_base 38: mod_base = OTHER; note = 2'-O-methyl modified nucleotide
  modified_base 39: mod_base = OTHER; note = 2'-O-methyl modified nucleotide
  modified_base 40: mod_base = OTHER; note = 2'-O-methyl modified nucleotide
  modified_base 69: mod_base = OTHER; note = 2'-O-methyl modified nucleotide
  modified_base 70: mod_base = OTHER; note = 2'-O-methyl modified nucleotide
  modified_base 71: mod_base = OTHER; note = 2'-O-methyl modified nucleotide
  modified_base 72: mod_base = OTHER; note = 2'-O-methyl modified nucleotide
  modified_base 73: mod_base = OTHER; note = 2'-O-methyl modified nucleotide
  modified_base 74: mod_base = OTHER; note = 2'-O-methyl modified nucleotide
  modified_base 75: mod_base = OTHER; note = 2'-O-methyl modified nucleotide
  modified_base 76: mod_base = OTHER; note = 2'-O-methyl modified nucleotide
  modified_base 77: mod_base = OTHER; note = 2'-O-methyl modified nucleotide
  modified_base 78: mod_base = OTHER; note = 2'-O-methyl modified nucleotide
  modified_base 79: mod_base = OTHER; note = 2'-O-methyl modified nucleotide
  modified_base 80: mod_base = OTHER; note = 2'-O-methyl modified nucleotide
  modified_base 81: mod_base = OTHER; note = 2'-O-methyl modified nucleotide
  modified_base 82: mod_base = OTHER; note = 2'-O-methyl modified nucleotide
  modified_base 83: mod_base = OTHER; note = 2'-O-methyl modified nucleotide
  modified_base 84: mod_base = OTHER; note = 2'-O-methyl modified nucleotide
  modified_base 85: mod_base = OTHER; note = 2'-O-methyl modified nucleotide
  modified_base 86: mod_base = OTHER; note = 2'-O-methyl modified nucleotide
  modified_base 87: mod_base = OTHER; note = 2'-O-methyl modified nucleotide
  modified_base 88: mod_base = OTHER; note = 2'-O-methyl modified nucleotide
  modified_base 89: mod_base = OTHER; note = 2'-O-methyl modified nucleotide
  modified_base 90: mod_base = OTHER; note = 2'-O-methyl modified nucleotide
  modified_base 91: mod_base = OTHER; note = 2'-O-methyl modified nucleotide
  modified_base 92: mod_base = OTHER; note = 2'-O-methyl modified nucleotide
  modified_base 93: mod_base = OTHER; note = 2'-O-methyl modified nucleotide
  modified_base 94: mod_base = OTHER; note = 2'-O-methyl modified nucleotide
  modified_base 95: mod_base = OTHER; note = 2'-O-methyl modified nucleotide
  modified_base 96: mod_base = OTHER; note = 2'-O-methyl modified nucleotide
  modified_base 97: mod_base = OTHER; note = 2'-O-methyl modified nucleotide with phosphorothioate linkage
  modified_base 98: mod_base = OTHER; note = 2'-O-methyl modified nucleotide with phosphorothioate linkage
  modified_base 99: mod_base = OTHER; note = 2'-O-methyl modified nucleotide with phosphorothioate linkage
  modified_base 100: mod_base = OTHER; note = 2'-O-methyl modified nucleotide

SEQ ID NO: 2049 - RNA, 91 nt, synthetic construct; identical to SEQ ID NO: 1049
  source 1..91: mol_type = other RNA
  modified_base 1: mod_base = OTHER; note = 2'-O-methyl modified nucleotide with phosphorothioate linkage
  modified_base 2: mod_base = OTHER; note = 2'-O-methyl modified nucleotide with phosphorothioate linkage
  modified_base 3: mod_base = OTHER; note = 2'-O-methyl modified nucleotide with phosphorothioate linkage
  modified_base 29: mod_base = OTHER; note = 2'-O-methyl modified nucleotide
  modified_base 30: mod_base = OTHER; note = 2'-O-methyl modified nucleotide
  modified_base 31: mod_base = OTHER; note = 2'-O-methyl modified nucleotide
  modified_base 32: mod_base = OTHER; note = 2'-O-methyl modified nucleotide
  modified_base 33: mod_base = OTHER; note = 2'-O-methyl modified nucleotide
  modified_base 34: mod_base = OTHER; note = 2'-O-methyl modified nucleotide
  modified_base 35: mod_base = OTHER; note = 2'-O-methyl modified nucleotide
  modified_base 36: mod_base = OTHER; note = 2'-O-methyl modified nucleotide
  modified_base 37: mod_base = OTHER; note = 2'-O-methyl modified nucleotide
  modified_base 38: mod_base = OTHER; note = 2'-O-methyl modified nucleotide
  modified_base 39: mod_base = OTHER; note = 2'-O-methyl modified nucleotide
  modified_base 40: mod_base = OTHER; note = 2'-O-methyl modified nucleotide
  modified_base 88: mod_base = OTHER; note = 2'-O-methyl modified nucleotide with phosphorothioate linkage
  modified_base 89: mod_base = OTHER; note = 2'-O-methyl modified nucleotide with phosphorothioate linkage
  modified_base 90: mod_base = OTHER; note = 2'-O-methyl modified nucleotide with phosphorothioate linkage
  modified_base 91: mod_base = OTHER; note = 2'-O-methyl modified nucleotide

SEQ ID NO: 2050 - RNA, 91 nt, synthetic construct; identical to SEQ ID NO: 1050
  source 1..91: mol_type = other RNA
  modified_base 1: mod_base = OTHER; note = 2'-O-methyl modified nucleotide with phosphorothioate linkage
  modified_base 2: mod_base = OTHER; note = 2'-O-methyl modified nucleotide with phosphorothioate linkage
  modified_base 3: mod_base = OTHER; note = 2'-O-methyl modified nucleotide with phosphorothioate linkage
  modified_base 29: mod_base = OTHER; note = 2'-O-methyl modified nucleotide
  modified_base 30: mod_base = OTHER; note = 2'-O-methyl modified nucleotide
  modified_base 31: mod_base = OTHER; note = 2'-O-methyl modified nucleotide
  modified_base 32: mod_base = OTHER; note = 2'-O-methyl modified nucleotide
  modified_base 33: mod_base = OTHER; note = 2'-O-methyl modified nucleotide
  modified_base 34: mod_base = OTHER; note = 2'-O-methyl modified nucleotide
  modified_base 35: mod_base = OTHER; note = 2'-O-methyl modified nucleotide
  modified_base 36: mod_base = OTHER; note = 2'-O-methyl modified nucleotide
  modified_base 37: mod_base = OTHER; note = 2'-O-methyl modified nucleotide
  modified_base 38: mod_base = OTHER; note = 2'-O-methyl modified nucleotide
  modified_base 39: mod_base = OTHER; note = 2'-O-methyl modified nucleotide
  modified_base 40: mod_base = OTHER; note = 2'-O-methyl modified nucleotide
  modified_base 88: mod_base = OTHER; note = 2'-O-methyl modified nucleotide with phosphorothioate linkage
  modified_base 89: mod_base = OTHER; note = 2'-O-methyl modified nucleotide with phosphorothioate linkage
  modified_base 90: mod_base = OTHER; note = 2'-O-methyl modified nucleotide with phosphorothioate linkage
  modified_base 91: mod_base = OTHER; note = 2'-O-methyl modified nucleotide

SEQ ID NO: 2051 - RNA, 91 nt, synthetic construct; identical to SEQ ID NO: 1051
  source 1..91: mol_type = other RNA
  modified_base 1: mod_base = OTHER; note = 2'-O-methyl modified nucleotide with phosphorothioate linkage
  modified_base 2: mod_base = OTHER; note = 2'-O-methyl modified nucleotide with phosphorothioate linkage
  modified_base 3: mod_base = OTHER; note = 2'-O-methyl modified nucleotide with phosphorothioate linkage
  modified_base 29: mod_base = OTHER; note = 2'-O-methyl modified nucleotide
  modified_base 30: mod_base = OTHER; note = 2'-O-methyl modified nucleotide
  modified_base 31: mod_base = OTHER; note = 2'-O-methyl modified nucleotide
  modified_base 32: mod_base = OTHER; note = 2'-O-methyl modified nucleotide
  modified_base 33: mod_base = OTHER; note = 2'-O-methyl modified nucleotide
  modified_base 34: mod_base = OTHER; note = 2'-O-methyl modified nucleotide
  modified_base 35: mod_base = OTHER; note = 2'-O-methyl modified nucleotide
  modified_base 36: mod_base = OTHER; note = 2'-O-methyl modified nucleotide
  modified_base 37: mod_base = OTHER; note = 2'-O-methyl modified nucleotide
  modified_base 38: mod_base = OTHER; note = 2'-O-methyl modified nucleotide
  modified_base 39: mod_base = OTHER; note = 2'-O-methyl modified nucleotide
  modified_base 40: mod_base = OTHER; note = 2'-O-methyl modified nucleotide
  modified_base 88: mod_base = OTHER; note = 2'-O-methyl modified nucleotide with phosphorothioate linkage
  modified_base 89: mod_base = OTHER; note = 2'-O-methyl modified nucleotide with phosphorothioate linkage
  modified_base 90: mod_base = OTHER; note = 2'-O-methyl modified nucleotide with phosphorothioate linkage
  modified_base 91: mod_base = OTHER; note = 2'-O-methyl modified nucleotide

SEQ ID NO: 2052 - RNA, 91 nt, synthetic construct; identical to SEQ ID NO: 1052
  source 1..91: mol_type = other RNA
  modified_base 1: mod_base = OTHER; note = 2'-O-methyl modified nucleotide with phosphorothioate linkage
  modified_base 2: mod_base = OTHER; note = 2'-O-methyl modified nucleotide with phosphorothioate linkage
  modified_base 3: mod_base = OTHER; note = 2'-O-methyl modified nucleotide with phosphorothioate linkage
  modified_base 29: mod_base = OTHER; note = 2'-O-methyl modified nucleotide
  modified_base 30: mod_base = OTHER; note = 2'-O-methyl modified nucleotide
  modified_base 31: mod_base = OTHER; note = 2'-O-methyl modified nucleotide
  modified_base 32: mod_base = OTHER; note = 2'-O-methyl modified nucleotide
  modified_base 33: mod_base = OTHER; note = 2'-O-methyl modified nucleotide
  modified_base 34: mod_base = OTHER; note = 2'-O-methyl modified nucleotide
  modified_base 35: mod_base = OTHER; note = 2'-O-methyl modified nucleotide
  modified_base 36: mod_base = OTHER; note = 2'-O-methyl modified nucleotide
  modified_base 37: mod_base = OTHER; note = 2'-O-methyl modified nucleotide
  modified_base 38: mod_base = OTHER; note = 2'-O-methyl modified nucleotide
  modified_base 39: mod_base = OTHER; note = 2'-O-methyl modified nucleotide
  modified_base 40: mod_base = OTHER; note = 2'-O-methyl modified nucleotide
  modified_base 88: mod_base = OTHER; note = 2'-O-methyl modified nucleotide with phosphorothioate linkage
  modified_base 89: mod_base = OTHER; note = 2'-O-methyl modified nucleotide with phosphorothioate linkage
  modified_base 90: mod_base = OTHER; note = 2'-O-methyl modified nucleotide with phosphorothioate linkage
  modified_base 91: mod_base = OTHER; note = 2'-O-methyl modified nucleotide

SEQ ID NO: 2053 - RNA, 91 nt, synthetic construct; identical to SEQ ID NO: 1053
  source 1..91: mol_type = other RNA
  modified_base 1: mod_base = OTHER; note = 2'-O-methyl modified nucleotide with phosphorothioate linkage
  modified_base 2: mod_base = OTHER; note = 2'-O-methyl modified nucleotide with phosphorothioate linkage
  modified_base 3: mod_base = OTHER; note = 2'-O-methyl modified nucleotide with phosphorothioate linkage
  modified_base 29: mod_base = OTHER; note = 2'-O-methyl modified nucleotide
  modified_base 30: mod_base = OTHER; note = 2'-O-methyl modified nucleotide
  modified_base 31: mod_base = OTHER; note = 2'-O-methyl modified nucleotide
  modified_base 32: mod_base = OTHER; note = 2'-O-methyl modified nucleotide
  modified_base 33: mod_base = OTHER; note = 2'-O-methyl modified nucleotide
  modified_base 34: mod_base = OTHER; note = 2'-O-methyl modified nucleotide
  modified_base 35: mod_base = OTHER; note = 2'-O-methyl modified nucleotide
  modified_base 36: mod_base = OTHER; note = 2'-O-methyl modified nucleotide
  modified_base 37: mod_base = OTHER; note = 2'-O-methyl modified nucleotide
  modified_base 38: mod_base = OTHER; note = 2'-O-methyl modified nucleotide
  modified_base 39: mod_base = OTHER; note = 2'-O-methyl modified nucleotide
  modified_base 40: mod_base = OTHER; note = 2'-O-methyl modified nucleotide
  modified_base 88: mod_base = OTHER; note = 2'-O-methyl modified nucleotide with phosphorothioate linkage
  modified_base 89: mod_base = OTHER; note = 2'-O-methyl modified nucleotide with phosphorothioate linkage
  modified_base 90: mod_base = OTHER; note = 2'-O-methyl modified nucleotide with phosphorothioate linkage
  modified_base 91: mod_base = OTHER; note = 2'-O-methyl modified nucleotide

SEQ ID NO: 2054 - RNA, 91 nt, synthetic construct; identical to SEQ ID NO: 1054
  source 1..91: mol_type = other RNA
  modified_base 1: mod_base = OTHER; note = 2'-O-methyl modified nucleotide with phosphorothioate linkage
  modified_base 2: mod_base = OTHER; note = 2'-O-methyl modified nucleotide with phosphorothioate linkage
  modified_base 3: mod_base = OTHER; note = 2'-O-methyl modified nucleotide with phosphorothioate linkage
  modified_base 29: mod_base = OTHER; note = 2'-O-methyl modified nucleotide
  modified_base 30: mod_base = OTHER; note = 2'-O-methyl modified nucleotide
  modified_base 31: mod_base = OTHER; note = 2'-O-methyl modified nucleotide
  modified_base 32: mod_base = OTHER; note = 2'-O-methyl modified nucleotide
  modified_base 33: mod_base = OTHER; note = 2'-O-methyl modified nucleotide
  modified_base 34: mod_base = OTHER; note = 2'-O-methyl modified nucleotide
  modified_base 35: mod_base = OTHER; note = 2'-O-methyl modified nucleotide
  modified_base 36: mod_base = OTHER; note = 2'-O-methyl modified nucleotide
  modified_base 37: mod_base = OTHER; note = 2'-O-methyl modified nucleotide
  modified_base 38: mod_base = OTHER; note = 2'-O-methyl modified nucleotide
  modified_base 39: mod_base = OTHER; note = 2'-O-methyl modified nucleotide
  modified_base 40: mod_base = OTHER; note = 2'-O-methyl modified nucleotide
  modified_base 88: mod_base = OTHER; note = 2'-O-methyl modified nucleotide with phosphorothioate linkage
  modified_base 89: mod_base = OTHER; note = 2'-O-methyl modified nucleotide with phosphorothioate linkage
  modified_base 90: mod_base = OTHER; note = 2'-O-methyl modified nucleotide with phosphorothioate linkage
  modified_base 91: mod_base = OTHER; note = 2'-O-methyl modified nucleotide

SEQ ID NO: 2055 - RNA, 91 nt, synthetic construct; identical to SEQ ID NO: 1055
  source 1..91: mol_type = other RNA
  modified_base 1: mod_base = OTHER; note = 2'-O-methyl modified nucleotide with phosphorothioate linkage
  modified_base 2: mod_base = OTHER; note = 2'-O-methyl modified nucleotide with phosphorothioate linkage
  modified_base 3: mod_base = OTHER; note = 2'-O-methyl modified nucleotide with phosphorothioate linkage
  modified_base 29: mod_base = OTHER; note = 2'-O-methyl modified nucleotide
  modified_base 30: mod_base = OTHER; note = 2'-O-methyl modified nucleotide
  modified_base 31: mod_base = OTHER; note = 2'-O-methyl modified nucleotide
  modified_base 32: mod_base = OTHER; note = 2'-O-methyl modified nucleotide
  modified_base 33: mod_base = OTHER; note = 2'-O-methyl modified nucleotide
  modified_base 34: mod_base = OTHER; note = 2'-O-methyl modified nucleotide
  modified_base 35: mod_base = OTHER; note = 2'-O-methyl modified nucleotide
  modified_base 36: mod_base = OTHER; note = 2'-O-methyl modified nucleotide
  modified_base 37: mod_base = OTHER; note = 2'-O-methyl modified nucleotide
  modified_base 38: mod_base = OTHER; note = 2'-O-methyl modified nucleotide
  modified_base 39: mod_base = OTHER; note = 2'-O-methyl modified nucleotide
  modified_base 40: mod_base = OTHER; note = 2'-O-methyl modified nucleotide
  modified_base 88: mod_base = OTHER; note = 2'-O-methyl modified nucleotide with phosphorothioate linkage
  modified_base 89: mod_base = OTHER; note = 2'-O-methyl modified nucleotide with phosphorothioate linkage
  modified_base 90: mod_base = OTHER; note = 2'-O-methyl modified nucleotide with phosphorothioate linkage
  modified_base 91: mod_base = OTHER; note = 2'-O-methyl modified nucleotide

SEQ ID NO: 2056 - RNA, 91 nt, synthetic construct; identical to SEQ ID NO: 1056
  source 1..91: mol_type = other RNA
  modified_base 1: mod_base = OTHER; note = 2'-O-methyl modified nucleotide with phosphorothioate linkage
  modified_base 2: mod_base = OTHER; note = 2'-O-methyl modified nucleotide with phosphorothioate linkage
  modified_base 3: mod_base = OTHER; note = 2'-O-methyl modified nucleotide with phosphorothioate linkage
  modified_base 29: mod_base = OTHER; note = 2'-O-methyl modified nucleotide
  modified_base 30: mod_base = OTHER; note = 2'-O-methyl modified nucleotide
  modified_base 31: mod_base = OTHER; note = 2'-O-methyl modified nucleotide
  modified_base 32: mod_base = OTHER; note = 2'-O-methyl modified nucleotide
  modified_base 33: mod_base = OTHER; note = 2'-O-methyl modified nucleotide
  modified_base 34: mod_base = OTHER; note = 2'-O-methyl modified nucleotide
  modified_base 35: mod_base = OTHER; note = 2'-O-methyl modified nucleotide
  modified_base 36: mod_base = OTHER; note = 2'-O-methyl modified nucleotide
  modified_base 37: mod_base = OTHER; note = 2'-O-methyl modified nucleotide
  modified_base 38: mod_base = OTHER; note = 2'-O-methyl modified nucleotide
  modified_base 39: mod_base = OTHER; note = 2'-O-methyl modified nucleotide
  modified_base 40: mod_base = OTHER; note = 2'-O-methyl modified nucleotide
  modified_base 88: mod_base = OTHER; note = 2'-O-methyl modified nucleotide with phosphorothioate linkage
  modified_base 89: mod_base = OTHER; note = 2'-O-methyl modified nucleotide with phosphorothioate linkage
  modified_base 90: mod_base = OTHER; note = 2'-O-methyl modified nucleotide with phosphorothioate linkage
  modified_base 91: mod_base = OTHER; note = 2'-O-methyl modified nucleotide

SEQ ID NO: 2057 - RNA, 91 nt, synthetic construct; identical to SEQ ID NO: 1057
  source 1..91: mol_type = other RNA
  modified_base 1: mod_base = OTHER; note = 2'-O-methyl modified nucleotide with phosphorothioate linkage
  modified_base 2: mod_base = OTHER; note = 2'-O-methyl modified nucleotide with phosphorothioate linkage
  modified_base 3: mod_base = OTHER; note = 2'-O-methyl modified nucleotide with phosphorothioate linkage
  modified_base 29: mod_base = OTHER; note = 2'-O-methyl modified nucleotide
  modified_base 30: mod_base = OTHER; note = 2'-O-methyl modified nucleotide
  modified_base 31: mod_base = OTHER; note = 2'-O-methyl modified nucleotide
  modified_base 32: mod_base = OTHER; note = 2'-O-methyl modified nucleotide
  modified_base 33: mod_base = OTHER; note = 2'-O-methyl modified nucleotide
  modified_base 34: mod_base = OTHER; note = 2'-O-methyl modified nucleotide
  modified_base 35: mod_base = OTHER; note = 2'-O-methyl modified nucleotide
  modified_base 36: mod_base = OTHER; note = 2'-O-methyl modified nucleotide
  modified_base 37: mod_base = OTHER; note = 2'-O-methyl modified nucleotide
  modified_base 38: mod_base = OTHER; note = 2'-O-methyl modified nucleotide
  modified_base 39: mod_base = OTHER; note = 2'-O-methyl modified nucleotide
  modified_base 40: mod_base = OTHER; note = 2'-O-methyl modified nucleotide
  modified_base 88: mod_base = OTHER; note = 2'-O-methyl modified nucleotide with phosphorothioate linkage
  modified_base 89: mod_base = OTHER; note = 2'-O-methyl modified nucleotide with phosphorothioate linkage
  modified_base 90: mod_base = OTHER; note = 2'-O-methyl modified nucleotide with phosphorothioate linkage
  modified_base 91: mod_base = OTHER; note = 2'-O-methyl modified nucleotide

SEQ ID NO: 2058 - RNA, 91 nt, synthetic construct; identical to SEQ ID NO: 1058
  source 1..91: mol_type = other RNA
  modified_base 1: mod_base = OTHER; note = 2'-O-methyl modified nucleotide with phosphorothioate linkage
  modified_base 2: mod_base = OTHER; note = 2'-O-methyl modified nucleotide with phosphorothioate linkage
  modified_base 3: mod_base = OTHER; note = 2'-O-methyl modified nucleotide with phosphorothioate linkage
  modified_base 29: mod_base = OTHER; note = 2'-O-methyl modified nucleotide
  modified_base 30: mod_base = OTHER; note = 2'-O-methyl modified nucleotide
  modified_base 31: mod_base = OTHER; note = 2'-O-methyl modified nucleotide
  modified_base 32: mod_base = OTHER; note = 2'-O-methyl modified nucleotide
  modified_base 33: mod_base = OTHER; note = 2'-O-methyl modified nucleotide
  modified_base 34: mod_base = OTHER; note = 2'-O-methyl modified nucleotide
  modified_base 35: mod_base = OTHER; note = 2'-O-methyl modified nucleotide
  modified_base 36: mod_base = OTHER; note = 2'-O-methyl modified nucleotide
  modified_base 37: mod_base = OTHER; note = 2'-O-methyl modified nucleotide
  modified_base 38: mod_base = OTHER; note = 2'-O-methyl modified nucleotide
  modified_base 39: mod_base = OTHER; note = 2'-O-methyl modified nucleotide
  modified_base 40: mod_base = OTHER; note = 2'-O-methyl modified nucleotide
  modified_base 88: mod_base = OTHER; note = 2'-O-methyl modified nucleotide with phosphorothioate linkage
  modified_base 89: mod_base = OTHER; note = 2'-O-methyl modified nucleotide with phosphorothioate linkage
  modified_base 90: mod_base = OTHER; note = 2'-O-methyl modified nucleotide with phosphorothioate linkage
  modified_base 91: mod_base = OTHER; note = 2'-O-methyl modified nucleotide

SEQ ID NO: 2059 - RNA, 91 nt, synthetic construct; identical to SEQ ID NO: 1059
  source 1..91: mol_type = other RNA
  modified_base 1: mod_base = OTHER; note = 2'-O-methyl modified nucleotide with phosphorothioate linkage
  modified_base 2: mod_base = OTHER; note = 2'-O-methyl modified nucleotide with phosphorothioate linkage
  modified_base 3: mod_base = OTHER; note = 2'-O-methyl modified nucleotide with phosphorothioate linkage
  modified_base 29: mod_base = OTHER; note = 2'-O-methyl modified nucleotide
  modified_base 30: mod_base = OTHER; note = 2'-O-methyl modified nucleotide
  modified_base 31: mod_base = OTHER; note = 2'-O-methyl modified nucleotide
  modified_base 32: mod_base = OTHER; note = 2'-O-methyl modified nucleotide
  modified_base 33: mod_base = OTHER; note = 2'-O-methyl modified nucleotide
  modified_base 34: mod_base = OTHER; note = 2'-O-methyl modified nucleotide
  modified_base 35: mod_base = OTHER; note = 2'-O-methyl modified nucleotide
  modified_base 36: mod_base = OTHER; note = 2'-O-methyl modified nucleotide
  modified_base 37: mod_base = OTHER; note = 2'-O-methyl modified nucleotide
  modified_base 38: mod_base = OTHER; note = 2'-O-methyl modified nucleotide
  modified_base 39: mod_base = OTHER; note = 2'-O-methyl modified nucleotide
  modified_base 40: mod_base = OTHER; note = 2'-O-methyl modified nucleotide
  modified_base 88: mod_base = OTHER; note = 2'-O-methyl modified nucleotide with phosphorothioate linkage
  modified_base 89: mod_base = OTHER; note = 2'-O-methyl modified nucleotide with phosphorothioate linkage
  modified_base 90: mod_base = OTHER; note = 2'-O-methyl modified nucleotide with phosphorothioate linkage
  modified_base 91: mod_base = OTHER; note = 2'-O-methyl modified nucleotide

SEQ ID NO: 2060 - RNA, 91 nt, synthetic construct; identical to SEQ ID NO: 1060
  source 1..91: mol_type = other RNA
  modified_base 1: mod_base = OTHER; note = 2'-O-methyl modified nucleotide with phosphorothioate linkage
  modified_base 2: mod_base = OTHER; note = 2'-O-methyl modified nucleotide with phosphorothioate linkage
  modified_base 3: mod_base = OTHER; note = 2'-O-methyl modified nucleotide with phosphorothioate linkage
  modified_base 29: mod_base = OTHER; note = 2'-O-methyl modified nucleotide
  modified_base 30: mod_base = OTHER; note = 2'-O-methyl modified nucleotide
  modified_base 31: mod_base = OTHER; note = 2'-O-methyl modified nucleotide
  modified_base 32: mod_base = OTHER; note = 2'-O-methyl modified nucleotide
  modified_base 33: mod_base = OTHER; note = 2'-O-methyl modified nucleotide
  modified_base 34: mod_base = OTHER; note = 2'-O-methyl modified nucleotide
  modified_base 35: mod_base = OTHER; note = 2'-O-methyl modified nucleotide
  modified_base 36: mod_base = OTHER; note = 2'-O-methyl modified nucleotide
  modified_base 37: mod_base = OTHER; note = 2'-O-methyl modified nucleotide
  modified_base 38: mod_base = OTHER; note = 2'-O-methyl modified nucleotide
  modified_base 39: mod_base = OTHER; note = 2'-O-methyl modified nucleotide
  modified_base 40: mod_base = OTHER; note = 2'-O-methyl modified nucleotide
  modified_base 88: mod_base = OTHER; note = 2'-O-methyl modified nucleotide with phosphorothioate linkage
  modified_base 89: mod_base = OTHER; note = 2'-O-methyl modified nucleotide with phosphorothioate linkage
  modified_base 90: mod_base = OTHER; note = 2'-O-methyl modified nucleotide with phosphorothioate linkage
  modified_base 91: mod_base = OTHER; note = 2'-O-methyl modified nucleotide

SEQ ID NO: 2061 - RNA, 91 nt, synthetic construct; identical to SEQ ID NO: 1061
  source 1..91: mol_type = other RNA
  modified_base 1: mod_base = OTHER; note = 2'-O-methyl modified nucleotide with phosphorothioate linkage
  modified_base 2: mod_base = OTHER; note = 2'-O-methyl modified nucleotide with phosphorothioate linkage
  modified_base 3: mod_base = OTHER; note = 2'-O-methyl modified nucleotide with phosphorothioate linkage
  modified_base 29: mod_base = OTHER; note = 2'-O-methyl modified nucleotide
  modified_base 30: mod_base = OTHER; note = 2'-O-methyl modified nucleotide
  modified_base 31: mod_base = OTHER; note = 2'-O-methyl modified nucleotide
  modified_base 32: mod_base = OTHER; note = 2'-O-methyl modified nucleotide
  modified_base 33: mod_base = OTHER; note = 2'-O-methyl modified nucleotide
  modified_base 34: mod_base = OTHER; note = 2'-O-methyl modified nucleotide
  modified_base 35: mod_base = OTHER; note = 2'-O-methyl modified nucleotide
  modified_base 36: mod_base = OTHER; note = 2'-O-methyl modified nucleotide
  modified_base 37: mod_base = OTHER; note = 2'-O-methyl modified nucleotide
  modified_base 38: mod_base = OTHER; note = 2'-O-methyl modified nucleotide
  modified_base 39: mod_base = OTHER; note = 2'-O-methyl modified nucleotide
  modified_base 40: mod_base = OTHER; note = 2'-O-methyl modified nucleotide
  modified_base 88: mod_base = OTHER; note = 2'-O-methyl modified nucleotide with phosphorothioate linkage
  modified_base 89: mod_base = OTHER; note = 2'-O-methyl modified nucleotide with phosphorothioate linkage
  modified_base 90: mod_base = OTHER; note = 2'-O-methyl modified nucleotide with phosphorothioate linkage
  modified_base 91: mod_base = OTHER; note = 2'-O-methyl modified nucleotide

SEQ ID NO: 2062 - RNA, 91 nt, synthetic construct; identical to SEQ ID NO: 1062
  source 1..91: mol_type = other RNA
  modified_base 1: mod_base = OTHER; note = 2'-O-methyl modified nucleotide with phosphorothioate linkage
  modified_base 2: mod_base = OTHER; note = 2'-O-methyl modified nucleotide with phosphorothioate linkage
  modified_base 3: mod_base = OTHER; note = 2'-O-methyl modified nucleotide with phosphorothioate linkage
  modified_base 29: mod_base = OTHER; note = 2'-O-methyl modified nucleotide
  modified_base 30: mod_base = OTHER; note = 2'-O-methyl modified nucleotide
  modified_base 31: mod_base = OTHER; note = 2'-O-methyl modified nucleotide
  modified_base 32: mod_base = OTHER; note = 2'-O-methyl modified nucleotide
  modified_base 33: mod_base = OTHER; note = 2'-O-methyl modified nucleotide
  modified_base 34: mod_base = OTHER; note = 2'-O-methyl modified nucleotide
  modified_base 35: mod_base = OTHER; note = 2'-O-methyl modified nucleotide
  modified_base 36: mod_base = OTHER; note = 2'-O-methyl modified nucleotide
  modified_base 37: mod_base = OTHER; note = 2'-O-methyl modified nucleotide
  modified_base 38: mod_base = OTHER; note = 2'-O-methyl modified nucleotide
  modified_base 39: mod_base = OTHER; note = 2'-O-methyl modified nucleotide
  modified_base 40: mod_base = OTHER; note = 2'-O-methyl modified nucleotide
  modified_base 88: mod_base = OTHER; note = 2'-O-methyl modified nucleotide with phosphorothioate linkage
  modified_base 89: mod_base = OTHER; note = 2'-O-methyl modified nucleotide with phosphorothioate linkage
  modified_base 90: mod_base = OTHER; note = 2'-O-methyl modified nucleotide with phosphorothioate linkage
  modified_base 91: mod_base = OTHER; note = 2'-O-methyl modified nucleotide

SEQ ID NO: 2063 - RNA, 91 nt, synthetic construct; identical to SEQ ID NO: 1063
  source 1..91: mol_type = other RNA
  modified_base 1: mod_base = OTHER; note = 2'-O-methyl modified nucleotide with phosphorothioate linkage
  modified_base 2: mod_base = OTHER; note = 2'-O-methyl modified nucleotide with phosphorothioate linkage
  modified_base 3: mod_base = OTHER; note = 2'-O-methyl modified nucleotide with phosphorothioate linkage
  modified_base 29: mod_base = OTHER; note = 2'-O-methyl modified nucleotide
  modified_base 30: mod_base = OTHER; note = 2'-O-methyl modified nucleotide
  modified_base 31: mod_base = OTHER; note = 2'-O-methyl modified nucleotide
  modified_base 32: mod_base = OTHER; note = 2'-O-methyl modified nucleotide
  modified_base 33: mod_base = OTHER; note = 2'-O-methyl modified nucleotide
  modified_base 34: mod_base = OTHER; note = 2'-O-methyl modified nucleotide
  modified_base 35: mod_base = OTHER; note = 2'-O-methyl modified nucleotide
  modified_base 36: mod_base = OTHER; note = 2'-O-methyl modified nucleotide
  modified_base 37: mod_base = OTHER; note = 2'-O-methyl modified nucleotide
  modified_base 38: mod_base = OTHER; note = 2'-O-methyl modified nucleotide
  modified_base 39: mod_base = OTHER; note = 2'-O-methyl modified nucleotide
  modified_base 40: mod_base = OTHER; note = 2'-O-methyl modified nucleotide
  modified_base 88: mod_base = OTHER; note = 2'-O-methyl modified nucleotide with phosphorothioate linkage
  modified_base 89: mod_base = OTHER; note = 2'-O-methyl modified nucleotide with phosphorothioate linkage
  modified_base 90: mod_base = OTHER; note = 2'-O-methyl modified nucleotide with phosphorothioate linkage
  modified_base 91: mod_base = OTHER; note = 2'-O-methyl modified nucleotide

SEQ ID NO: 2064 - RNA, 91 nt, synthetic construct; identical to SEQ ID NO: 1064
  source 1..91: mol_type = other RNA
  modified_base 1: mod_base = OTHER; note = 2'-O-methyl modified nucleotide with phosphorothioate linkage
  modified_base 2: mod_base = OTHER; note = 2'-O-methyl modified nucleotide with phosphorothioate linkage
  modified_base 3: mod_base = OTHER; note = 2'-O-methyl modified nucleotide with phosphorothioate linkage
  modified_base 29: mod_base = OTHER; note = 2'-O-methyl modified nucleotide
  modified_base 30: mod_base = OTHER; note = 2'-O-methyl modified nucleotide
  modified_base 31: mod_base = OTHER; note = 2'-O-methyl modified nucleotide
  modified_base 32: mod_base = OTHER; note = 2'-O-methyl modified nucleotide
  modified_base 33: mod_base = OTHER; note = 2'-O-methyl modified nucleotide
  modified_base 34: mod_base = OTHER; note = 2'-O-methyl modified nucleotide
  modified_base 35: mod_base = OTHER; note = 2'-O-methyl modified nucleotide
  modified_base 36: mod_base = OTHER; note = 2'-O-methyl modified nucleotide
  modified_base 37: mod_base = OTHER; note = 2'-O-methyl modified nucleotide
  modified_base 38: mod_base = OTHER; note = 2'-O-methyl modified nucleotide
  modified_base 39: mod_base = OTHER; note = 2'-O-methyl modified nucleotide
  modified_base 40: mod_base = OTHER; note = 2'-O-methyl modified nucleotide
  modified_base 88: mod_base = OTHER; note = 2'-O-methyl modified nucleotide with phosphorothioate linkage
  modified_base 89: mod_base = OTHER; note = 2'-O-methyl modified nucleotide with phosphorothioate linkage
  modified_base 90: mod_base = OTHER; note = 2'-O-methyl modified nucleotide with phosphorothioate linkage
  modified_base 91: mod_base = OTHER; note = 2'-O-methyl modified nucleotide

SEQ ID NO: 2065 - RNA, 91 nt, synthetic construct; identical to SEQ ID NO: 1065
  source 1..91: mol_type = other RNA
  modified_base 1: mod_base = OTHER; note = 2'-O-methyl modified nucleotide with phosphorothioate linkage
  modified_base 2: mod_base = OTHER; note = 2'-O-methyl modified nucleotide with phosphorothioate linkage
  modified_base 3: mod_base = OTHER; note = 2'-O-methyl modified nucleotide with phosphorothioate linkage
  modified_base 29: mod_base = OTHER; note = 2'-O-methyl modified nucleotide
  modified_base 30: mod_base = OTHER; note = 2'-O-methyl modified nucleotide
  modified_base 31: mod_base = OTHER; note = 2'-O-methyl modified nucleotide
  modified_base 32: mod_base = OTHER; note = 2'-O-methyl modified nucleotide
  modified_base 33: mod_base = OTHER; note = 2'-O-methyl modified nucleotide
  modified_base 34: mod_base = OTHER; note = 2'-O-methyl modified nucleotide
  modified_base 35: mod_base = OTHER; note = 2'-O-methyl modified nucleotide
  modified_base 36: mod_base = OTHER; note = 2'-O-methyl modified nucleotide
  modified_base 37: mod_base = OTHER; note = 2'-O-methyl modified nucleotide
  modified_base 38: mod_base = OTHER; note = 2'-O-methyl modified nucleotide
  modified_base 39: mod_base = OTHER; note = 2'-O-methyl modified nucleotide
  modified_base 40: mod_base = OTHER; note = 2'-O-methyl modified nucleotide
  modified_base 88: mod_base = OTHER; note = 2'-O-methyl modified nucleotide with phosphorothioate linkage
  modified_base 89: mod_base = OTHER; note = 2'-O-methyl modified nucleotide with phosphorothioate linkage
  modified_base 90: mod_base = OTHER; note = 2'-O-methyl modified nucleotide with phosphorothioate linkage
  modified_base 91: mod_base = OTHER; note = 2'-O-methyl modified nucleotide

SEQ ID NO: 2066 - RNA, 91 nt, synthetic construct; identical to SEQ ID NO: 1066
  source 1..91: mol_type = other RNA
  modified_base 1: mod_base = OTHER; note = 2'-O-methyl modified nucleotide with phosphorothioate linkage
  modified_base 2: mod_base = OTHER; note = 2'-O-methyl modified nucleotide with phosphorothioate linkage
  modified_base 3: mod_base = OTHER; note = 2'-O-methyl modified nucleotide with phosphorothioate linkage
  modified_base 29: mod_base = OTHER; note = 2'-O-methyl modified nucleotide
  modified_base 30: mod_base = OTHER; note = 2'-O-methyl modified nucleotide
  modified_base 31: mod_base = OTHER; note = 2'-O-methyl modified nucleotide
  modified_base 32: mod_base = OTHER; note = 2'-O-methyl modified nucleotide
  modified_base 33: mod_base = OTHER; note = 2'-O-methyl modified nucleotide
  modified_base 34: mod_base = OTHER; note = 2'-O-methyl modified nucleotide
  modified_base 35: mod_base = OTHER; note = 2'-O-methyl modified nucleotide
  modified_base 36: mod_base = OTHER; note = 2'-O-methyl modified nucleotide
  modified_base 37: mod_base = OTHER; note = 2'-O-methyl modified nucleotide
  modified_base 38: mod_base = OTHER; note = 2'-O-methyl modified nucleotide
  modified_base 39: mod_base = OTHER; note = 2'-O-methyl modified nucleotide
  modified_base 40: mod_base = OTHER; note = 2'-O-methyl modified nucleotide
  modified_base 88: mod_base = OTHER; note = 2'-O-methyl modified nucleotide with phosphorothioate linkage
  modified_base 89: mod_base = OTHER; note = 2'-O-methyl modified nucleotide with phosphorothioate linkage
  modified_base 90: mod_base = OTHER; note = 2'-O-methyl modified nucleotide with phosphorothioate linkage
  modified_base 91: mod_base = OTHER; note = 2'-O-methyl modified nucleotide

SEQ ID NO: 2067 - RNA, 91 nt, synthetic construct; identical to SEQ ID NO: 1067
  source 1..91: mol_type = other RNA
  modified_base 1: mod_base = OTHER; note = 2'-O-methyl modified nucleotide with phosphorothioate linkage
  modified_base 2: mod_base = OTHER; note = 2'-O-methyl modified nucleotide with phosphorothioate linkage
  modified_base 3: mod_base = OTHER; note = 2'-O-methyl modified nucleotide with phosphorothioate linkage
  modified_base 29: mod_base = OTHER; note = 2'-O-methyl modified nucleotide
  modified_base 30: mod_base = OTHER; note = 2'-O-methyl modified nucleotide
  modified_base 31: mod_base = OTHER; note = 2'-O-methyl modified nucleotide
  modified_base 32: mod_base = OTHER; note = 2'-O-methyl modified nucleotide
  modified_base 33: mod_base = OTHER; note = 2'-O-methyl modified nucleotide
  modified_base 34: mod_base = OTHER; note = 2'-O-methyl modified nucleotide
  modified_base 35: mod_base = OTHER; note = 2'-O-methyl modified nucleotide
  modified_base 36: mod_base = OTHER; note = 2'-O-methyl modified nucleotide
  modified_base 37: mod_base = OTHER; note = 2'-O-methyl modified nucleotide
  modified_base 38: mod_base = OTHER; note = 2'-O-methyl modified nucleotide
  modified_base 39: mod_base = OTHER; note = 2'-O-methyl modified nucleotide
  modified_base 40: mod_base = OTHER; note = 2'-O-methyl modified nucleotide
  modified_base 88: mod_base = OTHER; note = 2'-O-methyl modified nucleotide with phosphorothioate linkage
  modified_base 89: mod_base = OTHER; note = 2'-O-methyl modified nucleotide with phosphorothioate linkage
  modified_base 90: mod_base = OTHER; note = 2'-O-methyl modified nucleotide with phosphorothioate linkage
  modified_base 91: mod_base = OTHER; note = 2'-O-methyl modified nucleotide

SEQ ID NO: 2068 - RNA, 91 nt, synthetic construct; identical to SEQ ID NO: 1068
  source 1..91: mol_type = other RNA
  modified_base 1: mod_base = OTHER; note = 2'-O-methyl modified nucleotide with phosphorothioate linkage
  modified_base 2: mod_base = OTHER; note = 2'-O-methyl modified nucleotide with phosphorothioate linkage
  modified_base 3: mod_base = OTHER; note = 2'-O-methyl modified nucleotide with phosphorothioate linkage
  modified_base 29: mod_base = OTHER; note = 2'-O-methyl modified nucleotide
  modified_base 30: mod_base = OTHER; note = 2'-O-methyl modified nucleotide
  modified_base 31: mod_base = OTHER; note = 2'-O-methyl modified nucleotide
  modified_base 32: mod_base = OTHER; note = 2'-O-methyl modified nucleotide
  modified_base 33: mod_base = OTHER; note = 2'-O-methyl modified nucleotide
  modified_base 34: mod_base = OTHER; note = 2'-O-methyl modified nucleotide
  modified_base 35: mod_base = OTHER; note = 2'-O-methyl modified nucleotide
  modified_base 36: mod_base = OTHER; note = 2'-O-methyl modified nucleotide
  modified_base 37: mod_base = OTHER; note = 2'-O-methyl modified nucleotide
  modified_base 38: mod_base = OTHER; note = 2'-O-methyl modified nucleotide
  modified_base 39: mod_base = OTHER; note = 2'-O-methyl modified nucleotide
  modified_base 40: mod_base = OTHER; note = 2'-O-methyl modified nucleotide
  modified_base 88: mod_base = OTHER; note = 2'-O-methyl modified nucleotide with phosphorothioate linkage
  modified_base 89: mod_base = OTHER; note = 2'-O-methyl modified nucleotide with phosphorothioate linkage
  modified_base 90: mod_base = OTHER; note = 2'-O-methyl modified nucleotide with phosphorothioate linkage
  modified_base 91: mod_base = OTHER; note = 2'-O-methyl modified nucleotide

SEQ ID NO: 2069 - RNA, 91 nt, synthetic construct; identical to SEQ ID NO: 1069
  source 1..91: mol_type = other RNA
  modified_base 1: mod_base = OTHER; note = 2'-O-methyl modified nucleotide with phosphorothioate linkage
  modified_base 2: mod_base = OTHER; note = 2'-O-methyl modified nucleotide with phosphorothioate linkage
  modified_base 3: mod_base = OTHER; note = 2'-O-methyl modified nucleotide with phosphorothioate linkage
  modified_base 29: mod_base = OTHER; note = 2'-O-methyl modified nucleotide
  modified_base 30: mod_base = OTHER; note = 2'-O-methyl modified nucleotide
  modified_base 31: mod_base = OTHER; note = 2'-O-methyl modified nucleotide
  modified_base 32: mod_base = OTHER; note = 2'-O-methyl modified nucleotide
  modified_base 33: mod_base = OTHER; note = 2'-O-methyl modified nucleotide
  modified_base 34: mod_base = OTHER; note = 2'-O-methyl modified nucleotide
  modified_base 35: mod_base = OTHER; note = 2'-O-methyl modified nucleotide
  modified_base 36: mod_base = OTHER; note = 2'-O-methyl modified nucleotide
  modified_base 37: mod_base = OTHER; note = 2'-O-methyl modified nucleotide
  modified_base 38: mod_base = OTHER; note = 2'-O-methyl modified nucleotide
  modified_base 39: mod_base = OTHER; note = 2'-O-methyl modified nucleotide
  modified_base 40: mod_base = OTHER; note = 2'-O-methyl modified nucleotide
  modified_base 88: mod_base = OTHER; note = 2'-O-methyl modified nucleotide with phosphorothioate linkage
  modified_base 89: mod_base = OTHER; note = 2'-O-methyl modified nucleotide with phosphorothioate linkage
  modified_base 90: mod_base = OTHER; note = 2'-O-methyl modified nucleotide with phosphorothioate linkage
  modified_base 91: mod_base = OTHER; note = 2'-O-methyl modified nucleotide

SEQ ID NO: 2070 - RNA, 91 nt, synthetic construct; identical to SEQ ID NO: 1070
  source 1..91: mol_type = other RNA
  modified_base 1: mod_base = OTHER; note = 2'-O-methyl modified nucleotide with phosphorothioate linkage
  modified_base 2: mod_base = OTHER; note = 2'-O-methyl modified nucleotide with phosphorothioate linkage
  modified_base 3: mod_base = OTHER; note = 2'-O-methyl modified nucleotide with phosphorothioate linkage
  modified_base 29: mod_base = OTHER; note = 2'-O-methyl modified nucleotide
  modified_base 30: mod_base = OTHER; note = 2'-O-methyl modified nucleotide
  modified_base 31: mod_base = OTHER; note = 2'-O-methyl modified nucleotide
  modified_base 32: mod_base = OTHER; note = 2'-O-methyl modified nucleotide
  modified_base 33: mod_base = OTHER; note = 2'-O-methyl modified nucleotide
  modified_base 34: mod_base = OTHER; note = 2'-O-methyl modified nucleotide
  modified_base 35: mod_base = OTHER; note = 2'-O-methyl modified nucleotide
  modified_base 36: mod_base = OTHER; note = 2'-O-methyl modified nucleotide
  modified_base 37: mod_base = OTHER; note = 2'-O-methyl modified nucleotide
  modified_base 38: mod_base = OTHER; note = 2'-O-methyl modified nucleotide
  modified_base 39: mod_base = OTHER; note = 2'-O-methyl modified nucleotide
  modified_base 40: mod_base = OTHER; note = 2'-O-methyl modified nucleotide
  modified_base 88: mod_base = OTHER; note = 2'-O-methyl modified nucleotide with phosphorothioate linkage
  modified_base 89: mod_base = OTHER; note = 2'-O-methyl modified nucleotide with phosphorothioate linkage
  modified_base 90: mod_base = OTHER; note = 2'-O-methyl modified nucleotide with phosphorothioate linkage
  modified_base 91: mod_base = OTHER; note = 2'-O-methyl modified nucleotide

SEQ ID NO: 2071 - RNA, 91 nt, synthetic construct; identical to SEQ ID NO: 1050
  source 1..91: mol_type = other RNA
  modified_base 1: mod_base = OTHER; note = 2'-O-methyl modified nucleotide with phosphorothioate linkage
  modified_base 2: mod_base = OTHER; note = 2'-O-methyl modified nucleotide with phosphorothioate linkage
  modified_base 3: mod_base = OTHER; note = 2'-O-methyl modified nucleotide with phosphorothioate linkage
  modified_base 29: mod_base = OTHER; note = 2'-O-methyl modified nucleotide
  modified_base 30: mod_base = OTHER; note = 2'-O-methyl modified nucleotide
  modified_base 31: mod_base = OTHER; note = 2'-O-methyl modified nucleotide
  modified_base 32: mod_base = OTHER; note = 2'-O-methyl modified nucleotide
  modified_base 33: mod_base = OTHER; note = 2'-O-methyl modified nucleotide
  modified_base 34: mod_base = OTHER; note = 2'-O-methyl modified nucleotide
  modified_base 35: mod_base = OTHER; note = 2'-O-methyl modified nucleotide
  modified_base 36: mod_base = OTHER; note = 2'-O-methyl modified nucleotide
  modified_base 37: mod_base = OTHER; note = 2'-O-methyl modified nucleotide
  modified_base 38: mod_base = OTHER; note = 2'-O-methyl modified nucleotide
  modified_base 39: mod_base = OTHER; note = 2'-O-methyl modified nucleotide
  modified_base 40: mod_base = OTHER; note = 2'-O-methyl modified nucleotide
  modified_base 88: mod_base = OTHER; note = 2'-O-methyl modified nucleotide with phosphorothioate linkage
  modified_base 89: mod_base = OTHER; note = 2'-O-methyl modified nucleotide with phosphorothioate linkage
  modified_base 90: mod_base = OTHER; note = 2'-O-methyl modified nucleotide with phosphorothioate linkage
  modified_base 91: mod_base = OTHER; note = 2'-O-methyl modified nucleotide

SEQ ID NO: 2072 - RNA, 91 nt, synthetic construct; identical to SEQ ID NO: 1072
  source 1..91: mol_type = other RNA
  modified_base 1: mod_base = OTHER; note = 2'-O-methyl modified nucleotide with phosphorothioate linkage
  modified_base 2: mod_base = OTHER; note = 2'-O-methyl modified nucleotide with phosphorothioate linkage
  modified_base 3: mod_base = OTHER; note = 2'-O-methyl modified nucleotide with phosphorothioate linkage
  modified_base 29: mod_base = OTHER; note = 2'-O-methyl modified nucleotide
  modified_base 30: mod_base = OTHER; note = 2'-O-methyl modified nucleotide
  modified_base 31: mod_base = OTHER; note = 2'-O-methyl modified nucleotide
  modified_base 32: mod_base = OTHER; note = 2'-O-methyl modified nucleotide
  modified_base 33: mod_base = OTHER; note = 2'-O-methyl modified nucleotide
  modified_base 34: mod_base = OTHER; note = 2'-O-methyl modified nucleotide
  modified_base 35: mod_base = OTHER; note = 2'-O-methyl modified nucleotide
  modified_base 36: mod_base = OTHER; note = 2'-O-methyl modified nucleotide
  modified_base 37: mod_base = OTHER; note = 2'-O-methyl modified nucleotide
  modified_base 38: mod_base = OTHER; note = 2'-O-methyl modified nucleotide
  modified_base 39: mod_base = OTHER; note = 2'-O-methyl modified nucleotide
  modified_base 40: mod_base = OTHER; note = 2'-O-methyl modified nucleotide
  modified_base 88: mod_base = OTHER; note = 2'-O-methyl modified nucleotide with phosphorothioate linkage
  modified_base 89: mod_base = OTHER; note = 2'-O-methyl modified nucleotide with phosphorothioate linkage
  modified_base 90: mod_base = OTHER; note = 2'-O-methyl modified nucleotide with phosphorothioate linkage
  modified_base 91: mod_base = OTHER; note = 2'-O-methyl modified nucleotide

SEQ ID NO: 2073 - RNA, 91 nt, synthetic construct; identical to SEQ ID NO: 1073
  source 1..91: mol_type = other RNA
  modified_base 1: mod_base = OTHER; note = 2'-O-methyl modified nucleotide with phosphorothioate linkage
  modified_base 2: mod_base = OTHER; note = 2'-O-methyl modified nucleotide with phosphorothioate linkage
  modified_base 3: mod_base = OTHER; note = 2'-O-methyl modified nucleotide with phosphorothioate linkage
  modified_base 29: mod_base = OTHER; note = 2'-O-methyl modified nucleotide
  modified_base 30: mod_base = OTHER; note = 2'-O-methyl modified nucleotide
  modified_base 31: mod_base = OTHER; note = 2'-O-methyl modified nucleotide
  modified_base 32: mod_base = OTHER; note = 2'-O-methyl modified nucleotide
  modified_base 33: mod_base = OTHER; note = 2'-O-methyl modified nucleotide
  modified_base 34: mod_base = OTHER; note = 2'-O-methyl modified nucleotide
  modified_base 35: mod_base = OTHER; note = 2'-O-methyl modified nucleotide
  modified_base 36: mod_base = OTHER; note = 2'-O-methyl modified nucleotide
  modified_base 37: mod_base = OTHER; note = 2'-O-methyl modified nucleotide
  modified_base 38: mod_base = OTHER; note = 2'-O-methyl modified nucleotide
  modified_base 39: mod_base = OTHER; note = 2'-O-methyl modified nucleotide
  modified_base 40: mod_base = OTHER; note = 2'-O-methyl modified nucleotide
  modified_base 88: mod_base = OTHER; note = 2'-O-methyl modified nucleotide with phosphorothioate linkage
  modified_base 89: mod_base = OTHER; note = 2'-O-methyl modified nucleotide with phosphorothioate linkage
  modified_base 90: mod_base = OTHER; note = 2'-O-methyl modified nucleotide with phosphorothioate linkage
  modified_base 91: mod_base = OTHER; note = 2'-O-methyl modified nucleotide

SEQ ID NO: 2074 - RNA, 91 nt, synthetic construct; identical to SEQ ID NO: 1074
  source 1..91: mol_type = other RNA
  modified_base 1: mod_base = OTHER; note = 2'-O-methyl modified nucleotide with phosphorothioate linkage
  modified_base 2: mod_base = OTHER; note = 2'-O-methyl modified nucleotide with phosphorothioate linkage
  modified_base 3: mod_base = OTHER; note = 2'-O-methyl modified nucleotide with phosphorothioate linkage
  modified_base 29: mod_base = OTHER; note = 2'-O-methyl modified nucleotide
  modified_base 30: mod_base = OTHER; note = 2'-O-methyl modified nucleotide
  modified_base 31: mod_base = OTHER; note = 2'-O-methyl modified nucleotide
  modified_base 32: mod_base = OTHER; note = 2'-O-methyl modified nucleotide
  modified_base 33: mod_base = OTHER; note = 2'-O-methyl modified nucleotide
  modified_base 34: mod_base = OTHER; note = 2'-O-methyl modified nucleotide
  modified_base 35: mod_base = OTHER; note = 2'-O-methyl modified nucleotide
  modified_base 36: mod_base = OTHER; note = 2'-O-methyl modified nucleotide
  modified_base 37: mod_base = OTHER; note = 2'-O-methyl modified nucleotide
  modified_base 38: mod_base = OTHER; note = 2'-O-methyl modified nucleotide
  modified_base 39: mod_base = OTHER; note = 2'-O-methyl modified nucleotide
  modified_base 40: mod_base = OTHER; note = 2'-O-methyl modified nucleotide
  modified_base 88: mod_base = OTHER; note = 2'-O-methyl modified nucleotide with phosphorothioate linkage
  modified_base 89: mod_base = OTHER; note = 2'-O-methyl modified nucleotide with phosphorothioate linkage
  modified_base 90: mod_base = OTHER; note = 2'-O-methyl modified nucleotide with phosphorothioate linkage
  modified_base 91: mod_base = OTHER; note = 2'-O-methyl modified nucleotide

SEQ ID NO: 2075 - RNA, 91 nt, synthetic construct; identical to SEQ ID NO: 1075
  source 1..91: mol_type = other RNA
  modified_base 1: mod_base = OTHER; note = 2'-O-methyl modified nucleotide with phosphorothioate linkage
  modified_base 2: mod_base = OTHER; note = 2'-O-methyl modified nucleotide with phosphorothioate linkage
  modified_base 3: mod_base = OTHER; note = 2'-O-methyl modified nucleotide with phosphorothioate linkage
  modified_base 29: mod_base = OTHER; note = 2'-O-methyl modified nucleotide
  modified_base 30: mod_base = OTHER; note = 2'-O-methyl modified nucleotide
  modified_base 31: mod_base = OTHER; note = 2'-O-methyl modified nucleotide
  modified_base 32: mod_base = OTHER; note = 2'-O-methyl modified nucleotide
  modified_base 33: mod_base = OTHER; note = 2'-O-methyl modified nucleotide
  modified_base 34: mod_base = OTHER; note = 2'-O-methyl modified nucleotide
  modified_base 35: mod_base = OTHER; note = 2'-O-methyl modified nucleotide
  modified_base 36: mod_base = OTHER; note = 2'-O-methyl modified nucleotide
  modified_base 37: mod_base = OTHER; note = 2'-O-methyl modified nucleotide
  modified_base 38: mod_base = OTHER; note = 2'-O-methyl modified nucleotide
  modified_base 39: mod_base = OTHER; note = 2'-O-methyl modified nucleotide
  modified_base 40: mod_base = OTHER; note = 2'-O-methyl modified nucleotide
  modified_base 88: mod_base = OTHER; note = 2'-O-methyl modified nucleotide with phosphorothioate linkage
  modified_base 89: mod_base = OTHER; note = 2'-O-methyl modified nucleotide with phosphorothioate linkage
  modified_base 90: mod_base = OTHER; note = 2'-O-methyl modified nucleotide with phosphorothioate linkage
  modified_base 91: mod_base = OTHER; note = 2'-O-methyl modified nucleotide

SEQ ID NO: 2076 - RNA, 91 nt, synthetic construct; identical to SEQ ID NO: 1076
  source 1..91: mol_type = other RNA
  modified_base 1: mod_base = OTHER; note = 2'-O-methyl modified nucleotide with phosphorothioate linkage
  modified_base 2: mod_base = OTHER; note = 2'-O-methyl modified nucleotide with phosphorothioate linkage
  modified_base 3: mod_base = OTHER; note = 2'-O-methyl modified nucleotide with phosphorothioate linkage
  modified_base 29: mod_base = OTHER; note = 2'-O-methyl modified nucleotide
  modified_base 30: mod_base = OTHER; note = 2'-O-methyl modified nucleotide
  modified_base 31: mod_base = OTHER; note = 2'-O-methyl modified nucleotide
  modified_base 32: mod_base = OTHER; note = 2'-O-methyl modified nucleotide
  modified_base 33: mod_base = OTHER; note = 2'-O-methyl modified nucleotide
  modified_base 34: mod_base = OTHER; note = 2'-O-methyl modified nucleotide
  modified_base 35: mod_base = OTHER; note = 2'-O-methyl modified nucleotide
  modified_base 36: mod_base = OTHER; note = 2'-O-methyl modified nucleotide
  modified_base 37: mod_base = OTHER; note = 2'-O-methyl modified nucleotide
  modified_base 38: mod_base = OTHER; note = 2'-O-methyl modified nucleotide
  modified_base 39: mod_base = OTHER; note = 2'-O-methyl modified nucleotide
  modified_base 40: mod_base = OTHER; note = 2'-O-methyl modified nucleotide
  modified_base 88: mod_base = OTHER; note = 2'-O-methyl modified nucleotide with phosphorothioate linkage
  modified_base 89: mod_base = OTHER; note = 2'-O-methyl modified nucleotide with phosphorothioate linkage
  modified_base 90: mod_base = OTHER; note = 2'-O-methyl modified nucleotide with phosphorothioate linkage
  modified_base 91: mod_base = OTHER; note = 2'-O-methyl modified nucleotide

SEQ ID NO: 2077 - RNA, 91 nt, synthetic construct; identical to SEQ ID NO: 1077
  source 1..91: mol_type = other RNA
  modified_base 1: mod_base = OTHER; note = 2'-O-methyl modified nucleotide with phosphorothioate linkage
  modified_base 2: mod_base = OTHER; note = 2'-O-methyl modified nucleotide with phosphorothioate linkage
  modified_base 3: mod_base = OTHER; note = 2'-O-methyl modified nucleotide with phosphorothioate linkage
  modified_base 29: mod_base = OTHER; note = 2'-O-methyl modified nucleotide
  modified_base 30: mod_base = OTHER; note = 2'-O-methyl modified nucleotide
  modified_base 31: mod_base = OTHER; note = 2'-O-methyl modified nucleotide
  modified_base 32: mod_base = OTHER; note = 2'-O-methyl modified nucleotide
  modified_base 33: mod_base = OTHER; note = 2'-O-methyl modified nucleotide
  modified_base 34: mod_base = OTHER; note = 2'-O-methyl modified nucleotide
  modified_base 35: mod_base = OTHER; note = 2'-O-methyl modified nucleotide
  modified_base 36: mod_base = OTHER; note = 2'-O-methyl modified nucleotide
  modified_base 37: mod_base = OTHER; note = 2'-O-methyl modified nucleotide
  modified_base 38: mod_base = OTHER; note = 2'-O-methyl modified nucleotide
  modified_base 39: mod_base = OTHER; note = 2'-O-methyl modified nucleotide
  modified_base 40: mod_base = OTHER; note = 2'-O-methyl modified nucleotide
  modified_base 88: mod_base = OTHER; note = 2'-O-methyl modified nucleotide with phosphorothioate linkage
  modified_base 89: mod_base = OTHER; note = 2'-O-methyl modified nucleotide with phosphorothioate linkage
  modified_base 90: mod_base = OTHER; note = 2'-O-methyl modified nucleotide with phosphorothioate linkage
  modified_base 91: mod_base = OTHER; note = 2'-O-methyl modified nucleotide

SEQ ID NO: 2078 - RNA, 91 nt, synthetic construct; identical to SEQ ID NO: 1078
  source 1..91: mol_type = other RNA
  modified_base 1: mod_base = OTHER; note = 2'-O-methyl modified nucleotide with phosphorothioate linkage
  modified_base 2: mod_base = OTHER; note = 2'-O-methyl modified nucleotide with phosphorothioate linkage
  modified_base 3: mod_base = OTHER; note = 2'-O-methyl modified nucleotide with phosphorothioate linkage
  modified_base 29: mod_base = OTHER; note = 2'-O-methyl modified nucleotide
  modified_base 30: mod_base = OTHER; note = 2'-O-methyl modified nucleotide
  modified_base 31: mod_base = OTHER; note = 2'-O-methyl modified nucleotide
  modified_base 32: mod_base = OTHER; note = 2'-O-methyl modified nucleotide
  modified_base 33: mod_base = OTHER; note = 2'-O-methyl modified nucleotide
  modified_base 34: mod_base = OTHER; note = 2'-O-methyl modified nucleotide
  modified_base 35: mod_base = OTHER; note = 2'-O-methyl modified nucleotide
  modified_base 36: mod_base = OTHER; note = 2'-O-methyl modified nucleotide
  modified_base 37: mod_base = OTHER; note = 2'-O-methyl modified nucleotide
  modified_base 38: mod_base = OTHER; note = 2'-O-methyl modified nucleotide
  modified_base 39: mod_base = OTHER; note = 2'-O-methyl modified nucleotide
  modified_base 40: mod_base = OTHER; note = 2'-O-methyl modified nucleotide
  modified_base 88: mod_base = OTHER; note = 2'-O-methyl modified nucleotide with phosphorothioate linkage
  modified_base 89: mod_base = OTHER; note = 2'-O-methyl modified nucleotide with phosphorothioate linkage
  modified_base 90: mod_base = OTHER; note = 2'-O-methyl modified nucleotide with phosphorothioate linkage
  modified_base 91: mod_base = OTHER; note = 2'-O-methyl modified nucleotide

SEQ ID NO: 2079 - RNA, 91 nt, synthetic construct; identical to SEQ ID NO: 1079
  source 1..91: mol_type = other RNA
  modified_base 1: mod_base = OTHER; note = 2'-O-methyl modified nucleotide with phosphorothioate linkage
  modified_base 2: mod_base = OTHER; note = 2'-O-methyl modified nucleotide with phosphorothioate linkage
  modified_base 3: mod_base = OTHER; note = 2'-O-methyl modified nucleotide with phosphorothioate linkage
  modified_base 29: mod_base = OTHER; note = 2'-O-methyl modified nucleotide
  modified_base 30: mod_base = OTHER; note = 2'-O-methyl modified nucleotide
  modified_base 31: mod_base = OTHER; note = 2'-O-methyl modified nucleotide
  modified_base 32: mod_base = OTHER; note = 2'-O-methyl modified nucleotide
  modified_base 33: mod_base = OTHER; note = 2'-O-methyl modified nucleotide
  modified_base 34: mod_base = OTHER; note = 2'-O-methyl modified nucleotide
  modified_base 35: mod_base = OTHER; note = 2'-O-methyl modified nucleotide
  modified_base 36: mod_base = OTHER; note = 2'-O-methyl modified nucleotide
  modified_base 37: mod_base = OTHER; note = 2'-O-methyl modified nucleotide
  modified_base 38: mod_base = OTHER; note = 2'-O-methyl modified nucleotide
  modified_base 39: mod_base = OTHER; note = 2'-O-methyl modified nucleotide
  modified_base 40: mod_base = OTHER; note = 2'-O-methyl modified nucleotide
  modified_base 88: mod_base = OTHER; note = 2'-O-methyl modified nucleotide with phosphorothioate linkage
  modified_base 89: mod_base = OTHER; note = 2'-O-methyl modified nucleotide with phosphorothioate linkage
  modified_base 90: mod_base = OTHER; note = 2'-O-methyl modified nucleotide with phosphorothioate linkage
  modified_base 91: mod_base = OTHER; note = 2'-O-methyl modified nucleotide

SEQ ID NO: 2080 - RNA, 91 nt, synthetic construct; identical to SEQ ID NO: 1051
  source 1..91: mol_type = other RNA
  modified_base 1: mod_base = OTHER; note = 2'-O-methyl modified nucleotide with phosphorothioate linkage
  modified_base 2: mod_base = OTHER; note = 2'-O-methyl modified nucleotide with phosphorothioate linkage
  modified_base 3: mod_base = OTHER; note = 2'-O-methyl modified nucleotide with phosphorothioate linkage
  modified_base 29: mod_base = OTHER; note = 2'-O-methyl modified nucleotide
  modified_base 30: mod_base = OTHER; note = 2'-O-methyl modified nucleotide
  modified_base 31: mod_base = OTHER; note = 2'-O-methyl modified nucleotide
  modified_base 32: mod_base = OTHER; note = 2'-O-methyl modified nucleotide
  modified_base 33: mod_base = OTHER; note = 2'-O-methyl modified nucleotide
  modified_base 34: mod_base = OTHER; note = 2'-O-methyl modified nucleotide
  modified_base 35: mod_base = OTHER; note = 2'-O-methyl modified nucleotide
  modified_base 36: mod_base = OTHER; note = 2'-O-methyl modified nucleotide
  modified_base 37: mod_base = OTHER; note = 2'-O-methyl modified nucleotide
  modified_base 38: mod_base = OTHER; note = 2'-O-methyl modified nucleotide
  modified_base 39: mod_base = OTHER; note = 2'-O-methyl modified nucleotide
  modified_base 40: mod_base = OTHER; note = 2'-O-methyl modified nucleotide
  modified_base 88: mod_base = OTHER; note = 2'-O-methyl modified nucleotide with phosphorothioate linkage
  modified_base 89: mod_base = OTHER; note = 2'-O-methyl modified nucleotide with phosphorothioate linkage
  modified_base 90: mod_base = OTHER; note = 2'-O-methyl modified nucleotide with phosphorothioate linkage
  modified_base 91: mod_base = OTHER; note = 2'-O-methyl modified nucleotide

SEQ ID NO: 2081 - RNA, 91 nt, synthetic construct; identical to SEQ ID NO: 1081
  source 1..91: mol_type = other RNA
  modified_base 1: mod_base = OTHER; note = 2'-O-methyl modified nucleotide with phosphorothioate linkage
  modified_base 2: mod_base = OTHER; note = 2'-O-methyl modified nucleotide with phosphorothioate linkage
  modified_base 3: mod_base = OTHER; note = 2'-O-methyl modified nucleotide with phosphorothioate linkage
  modified_base 29: mod_base = OTHER; note = 2'-O-methyl modified nucleotide
  modified_base 30: mod_base = OTHER; note = 2'-O-methyl modified nucleotide
  modified_base 31: mod_base = OTHER; note = 2'-O-methyl modified nucleotide
  modified_base 32: mod_base = OTHER; note = 2'-O-methyl modified nucleotide
  modified_base 33: mod_base = OTHER; note = 2'-O-methyl modified nucleotide
  modified_base 34: mod_base = OTHER; note = 2'-O-methyl modified nucleotide
  modified_base 35: mod_base = OTHER; note = 2'-O-methyl modified nucleotide
  modified_base 36: mod_base = OTHER; note = 2'-O-methyl modified nucleotide
  modified_base 37: mod_base = OTHER; note = 2'-O-methyl modified nucleotide
  modified_base 38: mod_base = OTHER; note = 2'-O-methyl modified nucleotide
  modified_base 39: mod_base = OTHER; note = 2'-O-methyl modified nucleotide
  modified_base 40: mod_base = OTHER; note = 2'-O-methyl modified nucleotide
  modified_base 88: mod_base = OTHER; note = 2'-O-methyl modified nucleotide with phosphorothioate linkage
  modified_base 89: mod_base = OTHER; note = 2'-O-methyl modified nucleotide with phosphorothioate linkage
  modified_base 90: mod_base = OTHER; note = 2'-O-methyl modified nucleotide with phosphorothioate linkage
  modified_base 91: mod_base = OTHER; note = 2'-O-methyl modified nucleotide

SEQ ID NO: 2082 - RNA, 91 nt, synthetic construct; identical to SEQ ID NO: 1082
  source 1..91: mol_type = other RNA
  modified_base 1: mod_base = OTHER; note = 2'-O-methyl modified nucleotide with phosphorothioate linkage
  modified_base 2: mod_base = OTHER; note = 2'-O-methyl modified nucleotide with phosphorothioate linkage
  modified_base 3: mod_base = OTHER; note = 2'-O-methyl modified nucleotide with phosphorothioate linkage
  modified_base 29: mod_base = OTHER; note = 2'-O-methyl modified nucleotide
  modified_base 30: mod_base = OTHER; note = 2'-O-methyl modified nucleotide
  modified_base 31: mod_base = OTHER; note = 2'-O-methyl modified nucleotide
  modified_base 32: mod_base = OTHER; note = 2'-O-methyl modified nucleotide
  modified_base 33: mod_base = OTHER; note = 2'-O-methyl modified nucleotide
  modified_base 34: mod_base = OTHER; note = 2'-O-methyl modified nucleotide
  modified_base 35: mod_base = OTHER; note = 2'-O-methyl modified nucleotide
  modified_base 36: mod_base = OTHER; note = 2'-O-methyl modified nucleotide
  modified_base 37: mod_base = OTHER; note = 2'-O-methyl modified nucleotide
  modified_base 38: mod_base = OTHER; note = 2'-O-methyl modified nucleotide
  modified_base 39: mod_base = OTHER; note = 2'-O-methyl modified nucleotide
  modified_base 40: mod_base = OTHER; note = 2'-O-methyl modified nucleotide
  modified_base 88: mod_base = OTHER; note = 2'-O-methyl modified nucleotide with phosphorothioate linkage
  modified_base 89: mod_base = OTHER; note = 2'-O-methyl modified nucleotide with phosphorothioate linkage
  modified_base 90: mod_base = OTHER; note = 2'-O-methyl modified nucleotide with phosphorothioate linkage
  modified_base 91: mod_base = OTHER; note = 2'-O-methyl modified nucleotide

SEQ ID NO: 2083 - RNA, 91 nt, synthetic construct; identical to SEQ ID NO: 1083
  source 1..91: mol_type = other RNA
  modified_base 1: mod_base = OTHER; note = 2'-O-methyl modified nucleotide with phosphorothioate linkage
  modified_base 2: mod_base = OTHER; note = 2'-O-methyl modified nucleotide with phosphorothioate linkage
  modified_base 3: mod_base = OTHER; note = 2'-O-methyl modified nucleotide with phosphorothioate linkage
  modified_base 29: mod_base = OTHER; note = 2'-O-methyl modified nucleotide
  modified_base 30: mod_base = OTHER; note = 2'-O-methyl modified nucleotide
  modified_base 31: mod_base = OTHER; note = 2'-O-methyl modified nucleotide
  modified_base 32: mod_base = OTHER; note = 2'-O-methyl modified nucleotide
  modified_base 33: mod_base = OTHER; note = 2'-O-methyl modified nucleotide
  modified_base 34: mod_base = OTHER; note = 2'-O-methyl modified nucleotide
  modified_base 35: mod_base = OTHER; note = 2'-O-methyl modified nucleotide
  modified_base 36: mod_base = OTHER; note = 2'-O-methyl modified nucleotide
  modified_base 37: mod_base = OTHER; note = 2'-O-methyl modified nucleotide
  modified_base 38: mod_base = OTHER; note = 2'-O-methyl modified nucleotide
  modified_base 39: mod_base = OTHER; note = 2'-O-methyl modified nucleotide
  modified_base 40: mod_base = OTHER; note = 2'-O-methyl modified nucleotide
  modified_base 88: mod_base = OTHER; note = 2'-O-methyl modified nucleotide with phosphorothioate linkage
  modified_base 89: mod_base = OTHER; note = 2'-O-methyl modified nucleotide with phosphorothioate linkage
  modified_base 90: mod_base = OTHER; note = 2'-O-methyl modified nucleotide with phosphorothioate linkage
  modified_base 91: mod_base = OTHER; note = 2'-O-methyl modified nucleotide

SEQ ID NO: 2084 - RNA, 91 nt, synthetic construct; identical to SEQ ID NO: 1084
  source 1..91: mol_type = other RNA
  modified_base 1: mod_base = OTHER; note = 2'-O-methyl modified nucleotide with phosphorothioate linkage
  modified_base 2: mod_base = OTHER; note = 2'-O-methyl modified nucleotide with phosphorothioate linkage
  modified_base 3: mod_base = OTHER; note = 2'-O-methyl modified nucleotide with phosphorothioate linkage
  modified_base 29: mod_base = OTHER; note = 2'-O-methyl modified nucleotide
  modified_base 30: mod_base = OTHER; note = 2'-O-methyl modified nucleotide
  modified_base 31: mod_base = OTHER; note = 2'-O-methyl modified nucleotide
  modified_base 32: mod_base = OTHER; note = 2'-O-methyl modified nucleotide
  modified_base 33: mod_base = OTHER; note = 2'-O-methyl modified nucleotide
  modified_base 34: mod_base = OTHER; note = 2'-O-methyl modified nucleotide
  modified_base 35: mod_base = OTHER; note = 2'-O-methyl modified nucleotide
  modified_base 36: mod_base = OTHER; note = 2'-O-methyl modified nucleotide
  modified_base 37: mod_base = OTHER; note = 2'-O-methyl modified nucleotide
  modified_base 38: mod_base = OTHER; note = 2'-O-methyl modified nucleotide
  modified_base 39: mod_base = OTHER; note = 2'-O-methyl modified nucleotide
  modified_base 40: mod_base = OTHER; note = 2'-O-methyl modified nucleotide
  modified_base 88: mod_base = OTHER; note = 2'-O-methyl modified nucleotide with phosphorothioate linkage
  modified_base 89: mod_base = OTHER; note = 2'-O-methyl modified nucleotide with phosphorothioate linkage
  modified_base 90: mod_base = OTHER; note = 2'-O-methyl modified nucleotide with phosphorothioate linkage
  modified_base 91: mod_base = OTHER; note = 2'-O-methyl modified nucleotide

SEQ ID NO: 2085 - RNA, 91 nt, synthetic construct; identical to SEQ ID NO: 1085
  source 1..91: mol_type = other RNA
  modified_base 1: mod_base = OTHER; note = 2'-O-methyl modified nucleotide with phosphorothioate linkage
  modified_base 2: mod_base = OTHER; note = 2'-O-methyl modified nucleotide with phosphorothioate linkage
  modified_base 3: mod_base = OTHER; note = 2'-O-methyl modified nucleotide with phosphorothioate linkage
  modified_base 29: mod_base = OTHER; note = 2'-O-methyl modified nucleotide
  modified_base 30: mod_base = OTHER; note = 2'-O-methyl modified nucleotide
  modified_base 31: mod_base = OTHER; note = 2'-O-methyl modified nucleotide
  modified_base 32: mod_base = OTHER; note = 2'-O-methyl modified nucleotide
  modified_base 33: mod_base = OTHER; note = 2'-O-methyl modified nucleotide
  modified_base 34: mod_base = OTHER; note = 2'-O-methyl modified nucleotide
  modified_base 35: mod_base = OTHER; note = 2'-O-methyl modified nucleotide
  modified_base 36: mod_base = OTHER; note = 2'-O-methyl modified nucleotide
  modified_base 37: mod_base = OTHER; note = 2'-O-methyl modified nucleotide
  modified_base 38: mod_base = OTHER; note = 2'-O-methyl modified nucleotide
  modified_base 39: mod_base = OTHER; note = 2'-O-methyl modified nucleotide
  modified_base 40: mod_base = OTHER; note = 2'-O-methyl modified nucleotide
  modified_base 88: mod_base = OTHER; note = 2'-O-methyl modified nucleotide with phosphorothioate linkage
  modified_base 89: mod_base = OTHER; note = 2'-O-methyl modified nucleotide with phosphorothioate linkage
  modified_base 90: mod_base = OTHER; note = 2'-O-methyl modified nucleotide with phosphorothioate linkage
  modified_base 91: mod_base = OTHER; note = 2'-O-methyl modified nucleotide

SEQ ID NO: 2086 - RNA, 91 nt, synthetic construct; identical to SEQ ID NO: 1086
  source 1..91: mol_type = other RNA
  modified_base 1: mod_base = OTHER; note = 2'-O-methyl modified nucleotide with phosphorothioate linkage
  modified_base 2: mod_base = OTHER; note = 2'-O-methyl modified nucleotide with phosphorothioate linkage
  modified_base 3: mod_base = OTHER; note = 2'-O-methyl modified nucleotide with phosphorothioate linkage
  modified_base 29: mod_base = OTHER; note = 2'-O-methyl modified nucleotide
  modified_base 30: mod_base = OTHER; note = 2'-O-methyl modified nucleotide
  modified_base 31: mod_base = OTHER; note = 2'-O-methyl modified nucleotide
  modified_base 32: mod_base = OTHER; note = 2'-O-methyl modified nucleotide
  modified_base 33: mod_base = OTHER; note = 2'-O-methyl modified nucleotide
  modified_base 34: mod_base = OTHER; note = 2'-O-methyl modified nucleotide
  modified_base 35: mod_base = OTHER; note = 2'-O-methyl modified nucleotide
  modified_base 36: mod_base = OTHER; note = 2'-O-methyl modified nucleotide
  modified_base 37: mod_base = OTHER; note = 2'-O-methyl modified nucleotide
  modified_base 38: mod_base = OTHER; note = 2'-O-methyl modified nucleotide
  modified_base 39: mod_base = OTHER; note = 2'-O-methyl modified nucleotide
  modified_base 40: mod_base = OTHER; note = 2'-O-methyl modified nucleotide
  modified_base 88: mod_base = OTHER; note = 2'-O-methyl modified nucleotide with phosphorothioate linkage
  modified_base 89: mod_base = OTHER; note = 2'-O-methyl modified nucleotide with phosphorothioate linkage
  modified_base 90: mod_base = OTHER; note = 2'-O-methyl modified nucleotide with phosphorothioate linkage
  modified_base 91: mod_base = OTHER; note = 2'-O-methyl modified nucleotide

SEQ ID NO: 2087 - RNA, 91 nt, synthetic construct; identical to SEQ ID NO: 1087
  source 1..91: mol_type = other RNA
  modified_base 1: mod_base = OTHER; note = 2'-O-methyl modified nucleotide with phosphorothioate linkage
  modified_base 2: mod_base = OTHER; note = 2'-O-methyl modified nucleotide with phosphorothioate linkage
  modified_base 3: mod_base = OTHER; note = 2'-O-methyl modified nucleotide with phosphorothioate linkage
  modified_base 29: mod_base = OTHER; note = 2'-O-methyl modified nucleotide
  modified_base 30: mod_base = OTHER; note = 2'-O-methyl modified nucleotide
  modified_base 31: mod_base = OTHER; note = 2'-O-methyl modified nucleotide
  modified_base 32: mod_base = OTHER; note = 2'-O-methyl modified nucleotide
  modified_base 33: mod_base = OTHER; note = 2'-O-methyl modified nucleotide
  modified_base 34: mod_base = OTHER; note = 2'-O-methyl modified nucleotide
  modified_base 35: mod_base = OTHER; note = 2'-O-methyl modified nucleotide
  modified_base 36: mod_base = OTHER; note = 2'-O-methyl modified nucleotide
  modified_base 37: mod_base = OTHER; note = 2'-O-methyl modified nucleotide
  modified_base 38: mod_base = OTHER; note = 2'-O-methyl modified nucleotide
  modified_base 39: mod_base = OTHER; note = 2'-O-methyl modified nucleotide
  modified_base 40: mod_base = OTHER; note = 2'-O-methyl modified nucleotide
  modified_base 88: mod_base = OTHER; note = 2'-O-methyl modified nucleotide with phosphorothioate linkage
  modified_base 89: mod_base = OTHER; note = 2'-O-methyl modified nucleotide with phosphorothioate linkage
  modified_base 90: mod_base = OTHER; note = 2'-O-methyl modified nucleotide with phosphorothioate linkage
  modified_base 91: mod_base = OTHER; note = 2'-O-methyl modified nucleotide

SEQ ID NO: 2088 - RNA, 91 nt, synthetic construct; identical to SEQ ID NO: 1088
  source 1..91: mol_type = other RNA
  modified_base 1: mod_base = OTHER; note = 2'-O-methyl modified nucleotide with phosphorothioate linkage
  modified_base 2: mod_base = OTHER; note = 2'-O-methyl modified nucleotide with phosphorothioate linkage
  modified_base 3: mod_base = OTHER; note = 2'-O-methyl modified nucleotide with phosphorothioate linkage
  modified_base 29: mod_base = OTHER; note = 2'-O-methyl modified nucleotide
  modified_base 30: mod_base = OTHER; note = 2'-O-methyl modified nucleotide
  modified_base 31: mod_base = OTHER; note = 2'-O-methyl modified nucleotide
  modified_base 32: mod_base = OTHER; note = 2'-O-methyl modified nucleotide
  modified_base 33: mod_base = OTHER; note = 2'-O-methyl modified nucleotide
  modified_base 34: mod_base = OTHER; note = 2'-O-methyl modified nucleotide
  modified_base 35: mod_base = OTHER; note = 2'-O-methyl modified nucleotide
  modified_base 36: mod_base = OTHER; note = 2'-O-methyl modified nucleotide
  modified_base 37: mod_base = OTHER; note = 2'-O-methyl modified nucleotide
  modified_base 38: mod_base = OTHER; note = 2'-O-methyl modified nucleotide
  modified_base 39: mod_base = OTHER; note = 2'-O-methyl modified nucleotide
  modified_base 40: mod_base = OTHER; note = 2'-O-methyl modified nucleotide
  modified_base 88: mod_base = OTHER; note = 2'-O-methyl modified nucleotide with phosphorothioate linkage
  modified_base 89: mod_base = OTHER; note = 2'-O-methyl modified nucleotide with phosphorothioate linkage
  modified_base 90: mod_base = OTHER; note = 2'-O-methyl modified nucleotide with phosphorothioate linkage
  modified_base 91: mod_base = OTHER; note = 2'-O-methyl modified nucleotide

SEQ ID NO: 2089 - RNA, 91 nt, synthetic construct; identical to SEQ ID NO: 1089
  source 1..91: mol_type = other RNA
  modified_base 1: mod_base = OTHER; note = 2'-O-methyl modified nucleotide with phosphorothioate linkage
  modified_base 2: mod_base = OTHER; note = 2'-O-methyl modified nucleotide with phosphorothioate linkage
  modified_base 3: mod_base = OTHER; note = 2'-O-methyl modified nucleotide with phosphorothioate linkage
  modified_base 29: mod_base = OTHER; note = 2'-O-methyl modified nucleotide
  modified_base 30: mod_base = OTHER; note = 2'-O-methyl modified nucleotide
  modified_base 31: mod_base = OTHER; note = 2'-O-methyl modified nucleotide
  modified_base 32: mod_base = OTHER; note = 2'-O-methyl modified nucleotide
  modified_base 33: mod_base = OTHER; note = 2'-O-methyl modified nucleotide
  modified_base 34: mod_base = OTHER; note = 2'-O-methyl modified nucleotide
  modified_base 35: mod_base = OTHER; note = 2'-O-methyl modified nucleotide
  modified_base 36: mod_base = OTHER; note = 2'-O-methyl modified nucleotide
  modified_base 37: mod_base = OTHER; note = 2'-O-methyl modified nucleotide
  modified_base 38: mod_base = OTHER; note = 2'-O-methyl modified nucleotide
  modified_base 39: mod_base = OTHER; note = 2'-O-methyl modified nucleotide
  modified_base 40: mod_base = OTHER; note = 2'-O-methyl modified nucleotide
  modified_base 88: mod_base = OTHER; note = 2'-O-methyl modified nucleotide with phosphorothioate linkage
  modified_base 89: mod_base = OTHER; note = 2'-O-methyl modified nucleotide with phosphorothioate linkage
  modified_base 90: mod_base = OTHER; note = 2'-O-methyl modified nucleotide with phosphorothioate linkage
  modified_base 91: mod_base = OTHER; note = 2'-O-methyl modified nucleotide

SEQ ID NO: 2090 - RNA, 91 nt, synthetic construct; identical to SEQ ID NO: 1090
  source 1..91: mol_type = other RNA
  modified_base 1: mod_base = OTHER; note = 2'-O-methyl modified nucleotide with phosphorothioate linkage
  modified_base 2: mod_base = OTHER; note = 2'-O-methyl modified nucleotide with phosphorothioate linkage
  modified_base 3: mod_base = OTHER; note = 2'-O-methyl modified nucleotide with phosphorothioate linkage
  modified_base 29: mod_base = OTHER; note = 2'-O-methyl modified nucleotide
  modified_base 30: mod_base = OTHER; note = 2'-O-methyl modified nucleotide
  modified_base 31: mod_base = OTHER; note = 2'-O-methyl modified nucleotide
  modified_base 32: mod_base = OTHER; note = 2'-O-methyl modified nucleotide
  modified_base 33: mod_base = OTHER; note = 2'-O-methyl modified nucleotide
  modified_base 34: mod_base = OTHER; note = 2'-O-methyl modified nucleotide
  modified_base 35: mod_base = OTHER; note = 2'-O-methyl modified nucleotide
  modified_base 36: mod_base = OTHER; note = 2'-O-methyl modified nucleotide
  modified_base 37: mod_base = OTHER; note = 2'-O-methyl modified nucleotide
  modified_base 38: mod_base = OTHER; note = 2'-O-methyl modified nucleotide
  modified_base 39: mod_base = OTHER; note = 2'-O-methyl modified nucleotide
  modified_base 40: mod_base = OTHER; note = 2'-O-methyl modified nucleotide
  modified_base 88: mod_base = OTHER; note = 2'-O-methyl modified nucleotide with phosphorothioate linkage
  modified_base 89: mod_base = OTHER; note = 2'-O-methyl modified nucleotide with phosphorothioate linkage
  modified_base 90: mod_base = OTHER; note = 2'-O-methyl modified nucleotide with phosphorothioate linkage
  modified_base 91: mod_base = OTHER; note = 2'-O-methyl modified nucleotide

SEQ ID NO: 2091 - RNA, 91 nt, synthetic construct; identical to SEQ ID NO: 1091
  source 1..91: mol_type = other RNA
  modified_base 1: mod_base = OTHER; note = 2'-O-methyl modified nucleotide with phosphorothioate linkage
  modified_base 2: mod_base = OTHER; note = 2'-O-methyl modified nucleotide with phosphorothioate linkage
  modified_base 3: mod_base = OTHER; note = 2'-O-methyl modified nucleotide with phosphorothioate linkage
  modified_base 29: mod_base = OTHER; note = 2'-O-methyl modified nucleotide
  modified_base 30: mod_base = OTHER; note = 2'-O-methyl modified nucleotide
  modified_base 31: mod_base = OTHER; note = 2'-O-methyl modified nucleotide
  modified_base 32: mod_base = OTHER; note = 2'-O-methyl modified nucleotide
  modified_base 33: mod_base = OTHER; note = 2'-O-methyl modified nucleotide
  modified_base 34: mod_base = OTHER; note = 2'-O-methyl modified nucleotide
  modified_base 35: mod_base = OTHER; note = 2'-O-methyl modified nucleotide
  modified_base 36: mod_base = OTHER; note = 2'-O-methyl modified nucleotide
  modified_base 37: mod_base = OTHER; note = 2'-O-methyl modified nucleotide
  modified_base 38: mod_base = OTHER; note = 2'-O-methyl modified nucleotide
  modified_base 39: mod_base = OTHER; note = 2'-O-methyl modified nucleotide
  modified_base 40: mod_base = OTHER; note = 2'-O-methyl modified nucleotide
  modified_base 88: mod_base = OTHER; note = 2'-O-methyl modified nucleotide with phosphorothioate linkage
  modified_base 89: mod_base = OTHER; note = 2'-O-methyl modified nucleotide with phosphorothioate linkage
  modified_base 90: mod_base = OTHER; note = 2'-O-methyl modified nucleotide with phosphorothioate linkage
  modified_base 91: mod_base = OTHER; note = 2'-O-methyl modified nucleotide

SEQ ID NO: 2092-2100 - skipped (9 entries)

SEQ ID NO: 2101 - RNA, 101 nt, synthetic construct; identical to SEQ ID NO: 1101
  source 1..101: mol_type = other RNA
  modified_base 1: mod_base = OTHER; note = 2'-O-methyl modified nucleotide with phosphorothioate linkage
  modified_base 2: mod_base = OTHER; note = 2'-O-methyl modified nucleotide with phosphorothioate linkage
  modified_base 3: mod_base = OTHER; note = 2'-O-methyl modified nucleotide with phosphorothioate linkage
  modified_base 4: mod_base = OTHER; note = 2'-O-methyl modified nucleotide
  modified_base 5: mod_base = OTHER; note = 2'-O-methyl modified nucleotide
  modified_base 8: mod_base = OTHER; note = 2'-O-methyl modified nucleotide
  modified_base 9: mod_base = OTHER; note = 2'-O-methyl modified nucleotide
  modified_base 11: mod_base = OTHER; note = 2'-O-methyl modified nucleotide
  modified_base 13: mod_base = OTHER; note = 2'-O-methyl modified nucleotide
  modified_base 18: mod_base = OTHER; note = 2'-O-methyl modified nucleotide
  modified_base 22: mod_base = OTHER; note = 2'-O-methyl modified nucleotide
  modified_base 25: mod_base = OTHER; note = 2'-O-methyl modified nucleotide
  modified_base 29: mod_base = OTHER; note = 2'-O-methyl modified nucleotide
  modified_base 30: mod_base = OTHER; note = 2'-O-methyl modified nucleotide
  modified_base 31: mod_base = OTHER; note = 2'-O-methyl modified nucleotide
  modified_base 32: mod_base = OTHER; note = 2'-O-methyl modified nucleotide
  modified_base 37: mod_base = OTHER; note = 2'-O-methyl modified nucleotide
  modified_base 38: mod_base = OTHER; note = 2'-O-methyl modified nucleotide
  modified_base 39: mod_base = OTHER; note = 2'-O-methyl modified nucleotide
  modified_base 40: mod_base = OTHER; note = 2'-O-methyl modified nucleotide
  modified_base 41: mod_base = OTHER; note = 2'-O-methyl modified nucleotide
  modified_base 42: mod_base = OTHER; note = 2'-O-methyl modified nucleotide
  modified_base 43: mod_base = OTHER; note = 2'-O-methyl modified nucleotide
  modified_base 47: mod_base = OTHER; note = 2'-O-methyl modified nucleotide
  modified_base 48: mod_base = OTHER; note = 2'-O-methyl modified nucleotide
  modified_base 51: mod_base = OTHER; note = 2'-O-methyl modified nucleotide
  modified_base 54: mod_base = OTHER; note = nucleotide with phosphorothioate linkage
  modified_base 58: mod_base = OTHER; note = 2'-O-methyl modified nucleotide
  modified_base 59: mod_base = OTHER; note = 2'-O-methyl modified nucleotide
  modified_base 61: mod_base = OTHER; note = 2'-O-methyl modified nucleotide
  modified_base 62: mod_base = OTHER; note = 2'-O-methyl modified nucleotide
  modified_base 63: mod_base = OTHER; note = 2'-O-methyl modified nucleotide
  modified_base 64: mod_base = OTHER; note = 2'-O-methyl modified nucleotide
  modified_base 65: mod_base = OTHER; note = 2'-O-methyl modified nucleotide
  modified_base 66: mod_base = OTHER; note = 2'-O-methyl modified nucleotide
  modified_base 67: mod_base = OTHER; note = 2'-O-methyl modified nucleotide
  modified_base 68: mod_base = OTHER; note = 2'-O-methyl modified nucleotide
  modified_base 69: mod_base = OTHER; note = 2'-O-methyl modified nucleotide
  modified_base 70: mod_base = OTHER; note = 2'-O-methyl modified nucleotide
  modified_base 75: mod_base = OTHER; note = 2'-O-methyl modified nucleotide
  modified_base 77: mod_base = OTHER; note = 2'-O-methyl modified nucleotide
  modified_base 80: mod_base = OTHER; note = 2'-O-methyl modified nucleotide
  modified_base 86: mod_base = OTHER; note = 2'-O-methyl modified nucleotide
  modified_base 87: mod_base = OTHER; note = 2'-O-methyl modified nucleotide
  modified_base 89: mod_base = OTHER; note = 2'-O-methyl modified nucleotide
  modified_base 90: mod_base = OTHER; note = 2'-O-methyl modified nucleotide
  modified_base 91: mod_base = OTHER; note = 2'-O-methyl modified nucleotide
  modified_base 92: mod_base = OTHER; note = 2'-O-methyl modified nucleotide
  modified_base 99: mod_base = OTHER; note = nucleotide with phosphorothioate linkage
  modified_base 100: mod_base = OTHER; note = 2'-O-methyl modified nucleotide with phosphorothioate linkage
  modified_base 101: mod_base = OTHER; note = 2'-O-methyl modified nucleotide

SEQ ID NO: 2102 - RNA, 101 nt, synthetic construct; identical to SEQ ID NO: 1102
  source 1..101: mol_type = other RNA
  modified_base 1: mod_base = OTHER; note = 2'-O-methyl modified nucleotide with phosphorothioate linkage
  modified_base 2: mod_base = OTHER; note = 2'-O-methyl modified nucleotide with phosphorothioate linkage
  modified_base 3: mod_base = OTHER; note = 2'-O-methyl modified nucleotide with phosphorothioate linkage
  modified_base 4: mod_base = OTHER; note = 2'-O-methyl modified nucleotide
  modified_base 5: mod_base = OTHER; note = 2'-O-methyl modified nucleotide
  modified_base 8: mod_base = OTHER; note = 2'-O-methyl modified nucleotide
  modified_base 9: mod_base = OTHER; note = 2'-O-methyl modified nucleotide
  modified_base 11: mod_base = OTHER; note = 2'-O-methyl modified nucleotide
  modified_base 13: mod_base = OTHER; note = 2'-O-methyl modified nucleotide
  modified_base 18: mod_base = OTHER; note = 2'-O-methyl modified nucleotide
  modified_base 22: mod_base = OTHER; note = 2'-O-methyl modified nucleotide
  modified_base 25: mod_base = OTHER; note = 2'-O-methyl modified nucleotide
  modified_base 29: mod_base = OTHER; note = 2'-O-methyl modified nucleotide
  modified_base 30: mod_base = OTHER; note = 2'-O-methyl modified nucleotide
  modified_base 31: mod_base = OTHER; note = 2'-O-methyl modified nucleotide
  modified_base 32: mod_base = OTHER; note = 2'-O-methyl modified nucleotide
  modified_base 37: mod_base = OTHER; note = 2'-O-methyl modified nucleotide
  modified_base 38: mod_base = OTHER; note = 2'-O-methyl modified nucleotide
  modified_base 39: mod_base = OTHER; note = 2'-O-methyl modified nucleotide
  modified_base 40: mod_base = OTHER; note = 2'-O-methyl modified nucleotide
  modified_base 41: mod_base = OTHER; note = 2'-O-methyl modified nucleotide
  modified_base 42: mod_base = OTHER; note = 2'-O-methyl modified nucleotide
  modified_base 43: mod_base = OTHER; note = 2'-O-methyl modified nucleotide
  modified_base 47: mod_base = OTHER; note = 2'-O-methyl modified nucleotide
  modified_base 48: mod_base = OTHER; note = 2'-O-methyl modified nucleotide
  modified_base 51: mod_base = OTHER; note = 2'-O-methyl modified nucleotide
  modified_base 54: mod_base = OTHER; note = nucleotide with phosphorothioate linkage
  modified_base 58: mod_base = OTHER; note = 2'-O-methyl modified nucleotide
  modified_base 59: mod_base = OTHER; note = 2'-O-methyl modified nucleotide
  modified_base 61: mod_base = OTHER; note = 2'-O-methyl modified nucleotide
  modified_base 62: mod_base = OTHER; note = 2'-O-methyl modified nucleotide
  modified_base 63: mod_base = OTHER; note = 2'-O-methyl modified nucleotide
  modified_base 64: mod_base = OTHER; note = 2'-O-methyl modified nucleotide
  modified_base 65: mod_base = OTHER; note = 2'-O-methyl modified nucleotide
  modified_base 66: mod_base = OTHER; note = 2'-O-methyl modified nucleotide
  modified_base 67: mod_base = OTHER; note = 2'-O-methyl modified nucleotide
  modified_base 68: mod_base = OTHER; note = 2'-O-methyl modified nucleotide
  modified_base 69: mod_base = OTHER; note = 2'-O-methyl modified nucleotide
  modified_base 70: mod_base = OTHER; note = 2'-O-methyl modified nucleotide
  modified_base 75: mod_base = OTHER; note = 2'-O-methyl modified nucleotide
  modified_base 77: mod_base = OTHER; note = 2'-O-methyl modified nucleotide
  modified_base 80: mod_base = OTHER; note = 2'-O-methyl modified nucleotide
  modified_base 86: mod_base = OTHER; note = 2'-O-methyl modified nucleotide
  modified_base 87: mod_base = OTHER; note = 2'-O-methyl modified nucleotide
  modified_base 89: mod_base = OTHER; note = 2'-O-methyl modified nucleotide
  modified_base 90: mod_base = OTHER; note = 2'-O-methyl modified nucleotide
  modified_base 91: mod_base = OTHER; note = 2'-O-methyl modified nucleotide
  modified_base 92: mod_base = OTHER; note = 2'-O-methyl modified nucleotide
  modified_base 99: mod_base = OTHER; note = nucleotide with phosphorothioate linkage
  modified_base 100: mod_base = OTHER; note = 2'-O-methyl modified nucleotide with phosphorothioate linkage
  modified_base 101: mod_base = OTHER; note = 2'-O-methyl modified nucleotide

SEQ ID NO: 2103 - RNA, 101 nt, synthetic construct; identical to SEQ ID NO: 1103
  source 1..101: mol_type = other RNA
  modified_base 1: mod_base = OTHER; note = 2'-O-methyl modified nucleotide with phosphorothioate linkage
  modified_base 2: mod_base = OTHER; note = 2'-O-methyl modified nucleotide with phosphorothioate linkage
  modified_base 3: mod_base = OTHER; note = 2'-O-methyl modified nucleotide with phosphorothioate linkage
  modified_base 4: mod_base = OTHER; note = 2'-O-methyl modified nucleotide
  modified_base 5: mod_base = OTHER; note = 2'-O-methyl modified nucleotide
  modified_base 8: mod_base = OTHER; note = 2'-O-methyl modified nucleotide
  modified_base 9: mod_base = OTHER; note = 2'-O-methyl modified nucleotide
  modified_base 11: mod_base = OTHER; note = 2'-O-methyl modified nucleotide
  modified_base 13: mod_base = OTHER; note = 2'-O-methyl modified nucleotide
  modified_base 18: mod_base = OTHER; note = 2'-O-methyl modified nucleotide
  modified_base 22: mod_base = OTHER; note = 2'-O-methyl modified nucleotide
  modified_base 25: mod_base = OTHER; note = 2'-O-methyl modified nucleotide
  modified_base 29: mod_base = OTHER; note = 2'-O-methyl modified nucleotide
  modified_base 30: mod_base = OTHER; note = 2'-O-methyl modified nucleotide
  modified_base 31: mod_base = OTHER; note = 2'-O-methyl modified nucleotide
  modified_base 32: mod_base = OTHER; note = 2'-O-methyl modified nucleotide
  modified_base 37: mod_base = OTHER; note = 2'-O-methyl modified nucleotide
  modified_base 38: mod_base = OTHER; note = 2'-O-methyl modified nucleotide
  modified_base 39: mod_base = OTHER; note = 2'-O-methyl modified nucleotide
  modified_base 40: mod_base = OTHER; note = 2'-O-methyl modified nucleotide
  modified_base 41: mod_base = OTHER; note = 2'-O-methyl modified nucleotide
  modified_base 42: mod_base = OTHER; note = 2'-O-methyl modified nucleotide
  modified_base 43: mod_base = OTHER; note = 2'-O-methyl modified nucleotide
  modified_base 47: mod_base = OTHER; note = 2'-O-methyl modified nucleotide
  modified_base 48: mod_base = OTHER; note = 2'-O-methyl modified nucleotide
  modified_base 51: mod_base = OTHER; note = 2'-O-methyl modified nucleotide
  modified_base 54: mod_base = OTHER; note = nucleotide with phosphorothioate linkage
  modified_base 58: mod_base = OTHER; note = 2'-O-methyl modified nucleotide
  modified_base 59: mod_base = OTHER; note = 2'-O-methyl modified nucleotide
  modified_base 61: mod_base = OTHER; note = 2'-O-methyl modified nucleotide
  modified_base 62: mod_base = OTHER; note = 2'-O-methyl modified nucleotide
  modified_base 63: mod_base = OTHER; note = 2'-O-methyl modified nucleotide
  modified_base 64: mod_base = OTHER; note = 2'-O-methyl modified nucleotide
  modified_base 65: mod_base = OTHER; note = 2'-O-methyl modified nucleotide
  modified_base 66: mod_base = OTHER; note = 2'-O-methyl modified nucleotide
  modified_base 67: mod_base = OTHER; note = 2'-O-methyl modified nucleotide
  modified_base 68: mod_base = OTHER; note = 2'-O-methyl modified nucleotide
  modified_base 69: mod_base = OTHER; note = 2'-O-methyl modified nucleotide
  modified_base 70: mod_base = OTHER; note = 2'-O-methyl modified nucleotide
  modified_base 75: mod_base = OTHER; note = 2'-O-methyl modified nucleotide
  modified_base 77: mod_base = OTHER; note = 2'-O-methyl modified nucleotide
  modified_base 80: mod_base = OTHER; note = 2'-O-methyl modified nucleotide
  modified_base 86: mod_base = OTHER; note = 2'-O-methyl modified nucleotide
  modified_base 87: mod_base = OTHER; note = 2'-O-methyl modified nucleotide
  modified_base 89: mod_base = OTHER; note = 2'-O-methyl modified nucleotide
  modified_base 90: mod_base = OTHER; note = 2'-O-methyl modified nucleotide
  modified_base 91: mod_base = OTHER; note = 2'-O-methyl modified nucleotide
  modified_base 92: mod_base = OTHER; note = 2'-O-methyl modified nucleotide
  modified_base 99: mod_base = OTHER; note = nucleotide with phosphorothioate linkage
  modified_base 100: mod_base = OTHER; note = 2'-O-methyl modified nucleotide with phosphorothioate linkage
  modified_base 101: mod_base = OTHER; note = 2'-O-methyl modified nucleotide

SEQ ID NO: 2104 - RNA, 101 nt, synthetic construct; identical to SEQ ID NO: 1104
  source 1..101: mol_type = other RNA
  modified_base 1: mod_base = OTHER; note = 2'-O-methyl modified nucleotide with phosphorothioate linkage
  modified_base 2: mod_base = OTHER; note = 2'-O-methyl modified nucleotide with phosphorothioate linkage
  modified_base 3: mod_base = OTHER; note = 2'-O-methyl modified nucleotide with phosphorothioate linkage
  modified_base 4: mod_base = OTHER; note = 2'-O-methyl modified nucleotide
  modified_base 5: mod_base = OTHER; note = 2'-O-methyl modified nucleotide
  modified_base 8: mod_base = OTHER; note = 2'-O-methyl modified nucleotide
  modified_base 9: mod_base = OTHER; note = 2'-O-methyl modified nucleotide
  modified_base 11: mod_base = OTHER; note = 2'-O-methyl modified nucleotide
  modified_base 13: mod_base = OTHER; note = 2'-O-methyl modified nucleotide
  modified_base 18: mod_base = OTHER; note = 2'-O-methyl modified nucleotide
  modified_base 22: mod_base = OTHER; note = 2'-O-methyl modified nucleotide
  modified_base 25: mod_base = OTHER; note = 2'-O-methyl modified nucleotide
  modified_base 29: mod_base = OTHER; note = 2'-O-methyl modified nucleotide
  modified_base 30: mod_base = OTHER; note = 2'-O-methyl modified nucleotide
  modified_base 31: mod_base = OTHER; note = 2'-O-methyl modified nucleotide
  modified_base 32: mod_base = OTHER; note = 2'-O-methyl modified nucleotide
  modified_base 37: mod_base = OTHER; note = 2'-O-methyl modified nucleotide
  modified_base 38: mod_base = OTHER; note = 2'-O-methyl modified nucleotide
  modified_base 39: mod_base = OTHER; note = 2'-O-methyl modified nucleotide
  modified_base 40: mod_base = OTHER; note = 2'-O-methyl modified nucleotide
  modified_base 41: mod_base = OTHER; note = 2'-O-methyl modified nucleotide
  modified_base 42: mod_base = OTHER; note = 2'-O-methyl modified nucleotide
  modified_base 43: mod_base = OTHER; note = 2'-O-methyl modified nucleotide
  modified_base 47: mod_base = OTHER; note = 2'-O-methyl modified nucleotide
  modified_base 48: mod_base = OTHER; note = 2'-O-methyl modified nucleotide
  modified_base 51: mod_base = OTHER; note = 2'-O-methyl modified nucleotide
  modified_base 54: mod_base = OTHER; note = nucleotide with phosphorothioate linkage
  modified_base 58: mod_base = OTHER; note = 2'-O-methyl modified nucleotide
  modified_base 59: mod_base = OTHER; note = 2'-O-methyl modified nucleotide
  modified_base 61: mod_base = OTHER; note = 2'-O-methyl modified nucleotide
  modified_base 62: mod_base = OTHER; note = 2'-O-methyl modified nucleotide
  modified_base 63: mod_base = OTHER; note = 2'-O-methyl modified nucleotide
  modified_base 64: mod_base = OTHER; note = 2'-O-methyl modified nucleotide
  modified_base 65: mod_base = OTHER; note = 2'-O-methyl modified nucleotide
  modified_base 66: mod_base = OTHER; note = 2'-O-methyl modified nucleotide
  modified_base 67: mod_base = OTHER; note = 2'-O-methyl modified nucleotide
  modified_base 68: mod_base = OTHER; note = 2'-O-methyl modified nucleotide
  modified_base 69: mod_base = OTHER; note = 2'-O-methyl modified nucleotide
  modified_base 70: mod_base = OTHER; note = 2'-O-methyl modified nucleotide
  modified_base 75: mod_base = OTHER; note = 2'-O-methyl modified nucleotide
  modified_base 77: mod_base = OTHER; note = 2'-O-methyl modified nucleotide
  modified_base 80: mod_base = OTHER; note = 2'-O-methyl modified nucleotide
  modified_base 86: mod_base = OTHER; note = 2'-O-methyl modified nucleotide
  modified_base 87: mod_base = OTHER; note = 2'-O-methyl modified nucleotide
  modified_base 89: mod_base = OTHER; note = 2'-O-methyl modified nucleotide
  modified_base 90: mod_base = OTHER; note = 2'-O-methyl modified nucleotide
  modified_base 91: mod_base = OTHER; note = 2'-O-methyl modified nucleotide
  modified_base 92: mod_base = OTHER; note = 2'-O-methyl modified nucleotide
  modified_base 99: mod_base = OTHER; note = nucleotide with phosphorothioate linkage
  modified_base 100: mod_base = OTHER; note = 2'-O-methyl modified nucleotide with phosphorothioate linkage
  modified_base 101: mod_base = OTHER; note = 2'-O-methyl modified nucleotide

SEQ ID NO: 2105 - RNA, 101 nt, synthetic construct; identical to SEQ ID NO: 1105
  source 1..101: mol_type = other RNA
  modified_base 1: mod_base = OTHER; note = 2'-O-methyl modified nucleotide with phosphorothioate linkage
  modified_base 2: mod_base = OTHER; note = 2'-O-methyl modified nucleotide with phosphorothioate linkage
  modified_base 3: mod_base = OTHER; note = 2'-O-methyl modified nucleotide with phosphorothioate linkage
  modified_base 4: mod_base = OTHER; note = 2'-O-methyl modified nucleotide
  modified_base 5: mod_base = OTHER; note = 2'-O-methyl modified nucleotide
  modified_base 8: mod_base = OTHER; note = 2'-O-methyl modified nucleotide
  modified_base 9: mod_base = OTHER; note = 2'-O-methyl modified nucleotide
  modified_base 11: mod_base = OTHER; note = 2'-O-methyl modified nucleotide
  modified_base 13: mod_base = OTHER; note = 2'-O-methyl modified nucleotide
  modified_base 18: mod_base = OTHER; note = 2'-O-methyl modified nucleotide
  modified_base 22: mod_base = OTHER; note = 2'-O-methyl modified nucleotide
  modified_base 25: mod_base = OTHER; note = 2'-O-methyl modified nucleotide
  modified_base 29: mod_base = OTHER; note = 2'-O-methyl modified nucleotide
  modified_base 30: mod_base = OTHER; note = 2'-O-methyl modified nucleotide
  modified_base 31: mod_base = OTHER; note = 2'-O-methyl modified nucleotide
  modified_base 32: mod_base = OTHER; note = 2'-O-methyl modified nucleotide
  modified_base 37: mod_base = OTHER; note = 2'-O-methyl modified nucleotide
  modified_base 38: mod_base = OTHER; note = 2'-O-methyl modified nucleotide
  modified_base 39: mod_base = OTHER; note = 2'-O-methyl modified nucleotide
  modified_base 40: mod_base = OTHER; note = 2'-O-methyl modified nucleotide
  modified_base 41: mod_base = OTHER; note = 2'-O-methyl modified nucleotide
  modified_base 42: mod_base = OTHER; note = 2'-O-methyl modified nucleotide
  modified_base 43: mod_base = OTHER; note = 2'-O-methyl modified nucleotide
  modified_base 47: mod_base = OTHER; note = 2'-O-methyl modified nucleotide
  modified_base 48: mod_base = OTHER; note = 2'-O-methyl modified nucleotide
  modified_base 51: mod_base = OTHER; note = 2'-O-methyl modified nucleotide
  modified_base 54: mod_base = OTHER; note = nucleotide with phosphorothioate linkage
  modified_base 58: mod_base = OTHER; note = 2'-O-methyl modified nucleotide
  modified_base 59: mod_base = OTHER; note = 2'-O-methyl modified nucleotide
  modified_base 61: mod_base = OTHER; note = 2'-O-methyl modified nucleotide
  modified_base 62: mod_base = OTHER; note = 2'-O-methyl modified nucleotide
  modified_base 63: mod_base = OTHER; note = 2'-O-methyl modified nucleotide
  modified_base 64: mod_base = OTHER; note = 2'-O-methyl modified nucleotide
  modified_base 65: mod_base = OTHER; note = 2'-O-methyl modified nucleotide
  modified_base 66: mod_base = OTHER; note = 2'-O-methyl modified nucleotide
  modified_base 67: mod_base = OTHER; note = 2'-O-methyl modified nucleotide
  modified_base 68: mod_base = OTHER; note = 2'-O-methyl modified nucleotide
  modified_base 69: mod_base = OTHER; note = 2'-O-methyl modified nucleotide
  modified_base 70: mod_base = OTHER; note = 2'-O-methyl modified nucleotide
  modified_base 75: mod_base = OTHER; note = 2'-O-methyl modified nucleotide
  modified_base 77: mod_base = OTHER; note = 2'-O-methyl modified nucleotide
  modified_base 80: mod_base = OTHER; note = 2'-O-methyl modified nucleotide
  modified_base 86: mod_base = OTHER; note = 2'-O-methyl modified nucleotide
  modified_base 87: mod_base = OTHER; note = 2'-O-methyl modified nucleotide
  modified_base 89: mod_base = OTHER; note = 2'-O-methyl modified nucleotide
  modified_base 90: mod_base = OTHER; note = 2'-O-methyl modified nucleotide
  modified_base 91: mod_base = OTHER; note = 2'-O-methyl modified nucleotide
  modified_base 92: mod_base = OTHER; note = 2'-O-methyl modified nucleotide
  modified_base 99: mod_base = OTHER; note = nucleotide with phosphorothioate linkage
  modified_base 100: mod_base = OTHER; note = 2'-O-methyl modified nucleotide with phosphorothioate linkage
  modified_base 101: mod_base = OTHER; note = 2'-O-methyl modified nucleotide

SEQ ID NO: 2106 - RNA, 101 nt, synthetic construct; identical to SEQ ID NO: 1106
  source 1..101: mol_type = other RNA
  modified_base 1: mod_base = OTHER; note = 2'-O-methyl modified nucleotide with phosphorothioate linkage
  modified_base 2: mod_base = OTHER; note = 2'-O-methyl modified nucleotide with phosphorothioate linkage
  modified_base 3: mod_base = OTHER; note = 2'-O-methyl modified nucleotide with phosphorothioate linkage
  modified_base 4: mod_base = OTHER; note = 2'-O-methyl modified nucleotide
  modified_base 5: mod_base = OTHER; note = 2'-O-methyl modified nucleotide
  modified_base 8: mod_base = OTHER; note = 2'-O-methyl modified nucleotide
  modified_base 9: mod_base = OTHER; note = 2'-O-methyl modified nucleotide
  modified_base 11: mod_base = OTHER; note = 2'-O-methyl modified nucleotide
  modified_base 13: mod_base = OTHER; note = 2'-O-methyl modified nucleotide
  modified_base 18: mod_base = OTHER; note = 2'-O-methyl modified nucleotide
  modified_base 22: mod_base = OTHER; note = 2'-O-methyl modified nucleotide
  modified_base 25: mod_base = OTHER; note = 2'-O-methyl modified nucleotide
  modified_base 29: mod_base = OTHER; note = 2'-O-methyl modified nucleotide
  modified_base 30: mod_base = OTHER; note = 2'-O-methyl modified nucleotide
  modified_base 31: mod_base = OTHER; note = 2'-O-methyl modified nucleotide
  modified_base 32: mod_base = OTHER; note = 2'-O-methyl modified nucleotide
  modified_base 37: mod_base = OTHER; note = 2'-O-methyl modified nucleotide
  modified_base 38: mod_base = OTHER; note = 2'-O-methyl modified nucleotide
  modified_base 39: mod_base = OTHER; note = 2'-O-methyl modified nucleotide
  modified_base 40: mod_base = OTHER; note = 2'-O-methyl modified nucleotide
  modified_base 41: mod_base = OTHER; note = 2'-O-methyl modified nucleotide
  modified_base 42: mod_base = OTHER; note = 2'-O-methyl modified nucleotide
  modified_base 43: mod_base = OTHER; note = 2'-O-methyl modified nucleotide
  modified_base 47: mod_base = OTHER; note = 2'-O-methyl modified nucleotide
  modified_base 48: mod_base = OTHER; note = 2'-O-methyl modified nucleotide
  modified_base 51: mod_base = OTHER; note = 2'-O-methyl modified nucleotide
  modified_base 54: mod_base = OTHER; note = nucleotide with phosphorothioate linkage
  modified_base 58: mod_base = OTHER; note = 2'-O-methyl modified nucleotide
  modified_base 59: mod_base = OTHER; note = 2'-O-methyl modified nucleotide
  modified_base 61: mod_base = OTHER; note = 2'-O-methyl modified nucleotide
  modified_base 62: mod_base = OTHER; note = 2'-O-methyl modified nucleotide
  modified_base 63: mod_base = OTHER; note = 2'-O-methyl modified nucleotide
  modified_base 64: mod_base = OTHER; note = 2'-O-methyl modified nucleotide
  modified_base 65: mod_base = OTHER; note = 2'-O-methyl modified nucleotide
  modified_base 66: mod_base = OTHER; note = 2'-O-methyl modified nucleotide
  modified_base 67: mod_base = OTHER; note = 2'-O-methyl modified nucleotide
  modified_base 68: mod_base = OTHER; note = 2'-O-methyl modified nucleotide
  modified_base 69: mod_base = OTHER; note = 2'-O-methyl modified nucleotide
  modified_base 70: mod_base = OTHER; note = 2'-O-methyl modified nucleotide
  modified_base 75: mod_base = OTHER; note = 2'-O-methyl modified nucleotide
  modified_base 77: mod_base = OTHER; note = 2'-O-methyl modified nucleotide
  modified_base 80: mod_base = OTHER; note = 2'-O-methyl modified nucleotide
  modified_base 86: mod_base = OTHER; note = 2'-O-methyl modified nucleotide
  modified_base 87: mod_base = OTHER; note = 2'-O-methyl modified nucleotide
  modified_base 89: mod_base = OTHER; note = 2'-O-methyl modified nucleotide
  modified_base 90: mod_base = OTHER; note = 2'-O-methyl modified nucleotide
  modified_base 91: mod_base = OTHER; note = 2'-O-methyl modified nucleotide
  modified_base 92: mod_base = OTHER; note = 2'-O-methyl modified nucleotide
  modified_base 99: mod_base = OTHER; note = nucleotide with phosphorothioate linkage
  modified_base 100: mod_base = OTHER; note = 2'-O-methyl modified nucleotide with phosphorothioate linkage
  modified_base 101: mod_base = OTHER; note = 2'-O-methyl modified nucleotide

SEQ ID NO: 2107 - RNA, 101 nt, synthetic construct; identical to SEQ ID NO: 1107
  source 1..101: mol_type = other RNA
  modified_base 1: mod_base = OTHER; note = 2'-O-methyl modified nucleotide with phosphorothioate linkage
  modified_base 2: mod_base = OTHER; note = 2'-O-methyl modified nucleotide with phosphorothioate linkage
  modified_base 3: mod_base = OTHER; note = 2'-O-methyl modified nucleotide with phosphorothioate linkage
  modified_base 4: mod_base = OTHER; note = 2'-O-methyl modified nucleotide
  modified_base 5: mod_base = OTHER; note = 2'-O-methyl modified nucleotide
  modified_base 8: mod_base = OTHER; note = 2'-O-methyl modified nucleotide
  modified_base 9: mod_base = OTHER; note = 2'-O-methyl modified nucleotide
  modified_base 11: mod_base = OTHER; note = 2'-O-methyl modified nucleotide
  modified_base 13: mod_base = OTHER; note = 2'-O-methyl modified nucleotide
  modified_base 18: mod_base = OTHER; note = 2'-O-methyl modified nucleotide
  modified_base 22: mod_base = OTHER; note = 2'-O-methyl modified nucleotide
  modified_base 25: mod_base = OTHER; note = 2'-O-methyl modified nucleotide
  modified_base 29: mod_base = OTHER; note = 2'-O-methyl modified nucleotide
  modified_base 30: mod_base = OTHER; note = 2'-O-methyl modified nucleotide
  modified_base 31: mod_base = OTHER; note = 2'-O-methyl modified nucleotide
  modified_base 32: mod_base = OTHER; note = 2'-O-methyl modified nucleotide
  modified_base 37: mod_base = OTHER; note = 2'-O-methyl modified nucleotide
  modified_base 38: mod_base = OTHER; note = 2'-O-methyl modified nucleotide
  modified_base 39: mod_base = OTHER; note = 2'-O-methyl modified nucleotide
  modified_base 40: mod_base = OTHER; note = 2'-O-methyl modified nucleotide
  modified_base 41: mod_base = OTHER; note = 2'-O-methyl modified nucleotide
  modified_base 42: mod_base = OTHER; note = 2'-O-methyl modified nucleotide
  modified_base 43: mod_base = OTHER; note = 2'-O-methyl modified nucleotide
  modified_base 47: mod_base = OTHER; note = 2'-O-methyl modified nucleotide
  modified_base 48: mod_base = OTHER; note = 2'-O-methyl modified nucleotide
  modified_base 51: mod_base = OTHER; note = 2'-O-methyl modified nucleotide
  modified_base 54: mod_base = OTHER; note = nucleotide with phosphorothioate linkage
  modified_base 58: mod_base = OTHER; note = 2'-O-methyl modified nucleotide
  modified_base 59: mod_base = OTHER; note = 2'-O-methyl modified nucleotide
  modified_base 61: mod_base = OTHER; note = 2'-O-methyl modified nucleotide
  modified_base 62: mod_base = OTHER; note = 2'-O-methyl modified nucleotide
  modified_base 63: mod_base = OTHER; note = 2'-O-methyl modified nucleotide
  modified_base 64: mod_base = OTHER; note = 2'-O-methyl modified nucleotide
  modified_base 65: mod_base = OTHER; note = 2'-O-methyl modified nucleotide
  modified_base 66: mod_base = OTHER; note = 2'-O-methyl modified nucleotide
  modified_base 67: mod_base = OTHER; note = 2'-O-methyl modified nucleotide
  modified_base 68: mod_base = OTHER; note = 2'-O-methyl modified nucleotide
  modified_base 69: mod_base = OTHER; note = 2'-O-methyl modified nucleotide
  modified_base 70: mod_base = OTHER; note = 2'-O-methyl modified nucleotide
  modified_base 75: mod_base = OTHER; note = 2'-O-methyl modified nucleotide
  modified_base 77: mod_base = OTHER; note = 2'-O-methyl modified nucleotide
  modified_base 80: mod_base = OTHER; note = 2'-O-methyl modified nucleotide
  modified_base 86: mod_base = OTHER; note = 2'-O-methyl modified nucleotide
  modified_base 87: mod_base = OTHER; note = 2'-O-methyl modified nucleotide
  modified_base 89: mod_base = OTHER; note = 2'-O-methyl modified nucleotide
  modified_base 90: mod_base = OTHER; note = 2'-O-methyl modified nucleotide
  modified_base 91: mod_base = OTHER; note = 2'-O-methyl modified nucleotide
  modified_base 92: mod_base = OTHER; note = 2'-O-methyl modified nucleotide
  modified_base 99: mod_base = OTHER; note = nucleotide with phosphorothioate linkage
  modified_base 100: mod_base = OTHER; note = 2'-O-methyl modified nucleotide with phosphorothioate linkage
  modified_base 101: mod_base = OTHER; note = 2'-O-methyl modified nucleotide

SEQ ID NO: 2108 - RNA, 101 nt, synthetic construct; identical to SEQ ID NO: 1108
  source 1..101: mol_type = other RNA
  modified_base 1: mod_base = OTHER; note = 2'-O-methyl modified nucleotide with phosphorothioate linkage
  modified_base 2: mod_base = OTHER; note = 2'-O-methyl modified nucleotide with phosphorothioate linkage
  modified_base 3: mod_base = OTHER; note = 2'-O-methyl modified nucleotide with phosphorothioate linkage
  modified_base 4: mod_base = OTHER; note = 2'-O-methyl modified nucleotide
  modified_base 5: mod_base = OTHER; note = 2'-O-methyl modified nucleotide
  modified_base 8: mod_base = OTHER; note = 2'-O-methyl modified nucleotide
  modified_base 9: mod_base = OTHER; note = 2'-O-methyl modified nucleotide
  modified_base 11: mod_base = OTHER; note = 2'-O-methyl modified nucleotide
  modified_base 13: mod_base = OTHER; note = 2'-O-methyl modified nucleotide
  modified_base 18: mod_base = OTHER; note = 2'-O-methyl modified nucleotide
  modified_base 22: mod_base = OTHER; note = 2'-O-methyl modified nucleotide
  modified_base 25: mod_base = OTHER; note = 2'-O-methyl modified nucleotide
  modified_base 29: mod_base = OTHER; note = 2'-O-methyl modified nucleotide
  modified_base 30: mod_base = OTHER; note = 2'-O-methyl modified nucleotide
  modified_base 31: mod_base = OTHER; note = 2'-O-methyl modified nucleotide
  modified_base 32: mod_base = OTHER; note = 2'-O-methyl modified nucleotide
  modified_base 37: mod_base = OTHER; note = 2'-O-methyl modified nucleotide
  modified_base 38: mod_base = OTHER; note = 2'-O-methyl modified nucleotide
  modified_base 39: mod_base = OTHER; note = 2'-O-methyl modified nucleotide
  modified_base 40: mod_base = OTHER; note = 2'-O-methyl modified nucleotide
  modified_base 41: mod_base = OTHER; note = 2'-O-methyl modified nucleotide
  modified_base 42: mod_base = OTHER; note = 2'-O-methyl modified nucleotide
  modified_base 43: mod_base = OTHER; note = 2'-O-methyl modified nucleotide
  modified_base 47: mod_base = OTHER; note = 2'-O-methyl modified nucleotide
  modified_base 48: mod_base = OTHER; note = 2'-O-methyl modified nucleotide
  modified_base 51: mod_base = OTHER; note = 2'-O-methyl modified nucleotide
  modified_base 54: mod_base = OTHER; note = nucleotide with phosphorothioate linkage
  modified_base 58: mod_base = OTHER; note = 2'-O-methyl modified nucleotide
  modified_base 59: mod_base = OTHER; note = 2'-O-methyl modified nucleotide
  modified_base 61: mod_base = OTHER; note = 2'-O-methyl modified nucleotide
  modified_base 62: mod_base = OTHER; note = 2'-O-methyl modified nucleotide
  modified_base 63: mod_base = OTHER; note = 2'-O-methyl modified nucleotide
  modified_base 64: mod_base = OTHER; note = 2'-O-methyl modified nucleotide
  modified_base 65: mod_base = OTHER; note = 2'-O-methyl modified nucleotide
  modified_base 66: mod_base = OTHER; note = 2'-O-methyl modified nucleotide
  modified_base 67: mod_base = OTHER; note = 2'-O-methyl modified nucleotide
  modified_base 68: mod_base = OTHER; note = 2'-O-methyl modified nucleotide
  modified_base 69: mod_base = OTHER; note = 2'-O-methyl modified nucleotide
  modified_base 70: mod_base = OTHER; note = 2'-O-methyl modified nucleotide
  modified_base 75: mod_base = OTHER; note = 2'-O-methyl modified nucleotide
  modified_base 77: mod_base = OTHER; note = 2'-O-methyl modified nucleotide
  modified_base 80: mod_base = OTHER; note = 2'-O-methyl modified nucleotide
  modified_base 86: mod_base = OTHER; note = 2'-O-methyl modified nucleotide
  modified_base 87: mod_base = OTHER; note = 2'-O-methyl modified nucleotide
  modified_base 89: mod_base = OTHER; note = 2'-O-methyl modified nucleotide
  modified_base 90: mod_base = OTHER; note = 2'-O-methyl modified nucleotide
  modified_base 91: mod_base = OTHER; note = 2'-O-methyl modified nucleotide
  modified_base 92: mod_base = OTHER; note = 2'-O-methyl modified nucleotide
  modified_base 99: mod_base = OTHER; note = nucleotide with phosphorothioate linkage
  modified_base 100: mod_base = OTHER; note = 2'-O-methyl modified nucleotide with phosphorothioate linkage
  modified_base 101: mod_base = OTHER; note = 2'-O-methyl modified nucleotide

SEQ ID NO: 2109 - RNA, 101 nt, synthetic construct; identical to SEQ ID NO: 1109
  source 1..101: mol_type = other RNA
  modified_base 1: mod_base = OTHER; note = 2'-O-methyl modified nucleotide with phosphorothioate linkage
  modified_base 2: mod_base = OTHER; note = 2'-O-methyl modified nucleotide with phosphorothioate linkage
  modified_base 3: mod_base = OTHER; note = 2'-O-methyl modified nucleotide with phosphorothioate linkage
  modified_base 4: mod_base = OTHER; note = 2'-O-methyl modified nucleotide
  modified_base 5: mod_base = OTHER; note = 2'-O-methyl modified nucleotide
  modified_base 8: mod_base = OTHER; note = 2'-O-methyl modified nucleotide
  modified_base 9: mod_base = OTHER; note = 2'-O-methyl modified nucleotide
  modified_base 11: mod_base = OTHER; note = 2'-O-methyl modified nucleotide
  modified_base 13: mod_base = OTHER; note = 2'-O-methyl modified nucleotide
  modified_base 18: mod_base = OTHER; note = 2'-O-methyl modified nucleotide
  modified_base 22: mod_base = OTHER; note = 2'-O-methyl modified nucleotide
  modified_base 25: mod_base = OTHER; note = 2'-O-methyl modified nucleotide
  modified_base 29: mod_base = OTHER; note = 2'-O-methyl modified nucleotide
  modified_base 30: mod_base = OTHER; note = 2'-O-methyl modified nucleotide
  modified_base 31: mod_base = OTHER; note = 2'-O-methyl modified nucleotide
  modified_base 32: mod_base = OTHER; note = 2'-O-methyl modified nucleotide
  modified_base 37: mod_base = OTHER; note = 2'-O-methyl modified nucleotide
  modified_base 38: mod_base = OTHER; note = 2'-O-methyl modified nucleotide
  modified_base 39: mod_base = OTHER; note = 2'-O-methyl modified nucleotide
  modified_base 40: mod_base = OTHER; note = 2'-O-methyl modified nucleotide
  modified_base 41: mod_base = OTHER; note = 2'-O-methyl modified nucleotide
  modified_base 42: mod_base = OTHER; note = 2'-O-methyl modified nucleotide
  modified_base 43: mod_base = OTHER; note = 2'-O-methyl modified nucleotide
  modified_base 47: mod_base = OTHER; note = 2'-O-methyl modified nucleotide
  modified_base 48: mod_base = OTHER; note = 2'-O-methyl modified nucleotide
  modified_base 51: mod_base = OTHER; note = 2'-O-methyl modified nucleotide
  modified_base 54: mod_base = OTHER; note = nucleotide with phosphorothioate linkage
  modified_base 58: mod_base = OTHER; note = 2'-O-methyl modified nucleotide
  modified_base 59: mod_base = OTHER; note = 2'-O-methyl modified nucleotide
  modified_base 61: mod_base = OTHER; note = 2'-O-methyl modified nucleotide
  modified_base 62: mod_base = OTHER; note = 2'-O-methyl modified nucleotide
  modified_base 63: mod_base = OTHER; note = 2'-O-methyl modified nucleotide
  modified_base 64: mod_base = OTHER; note = 2'-O-methyl modified nucleotide
  modified_base 65: mod_base = OTHER; note = 2'-O-methyl modified nucleotide
  modified_base 66: mod_base = OTHER; note = 2'-O-methyl modified nucleotide
  modified_base 67: mod_base = OTHER; note = 2'-O-methyl modified nucleotide
  modified_base 68: mod_base = OTHER; note = 2'-O-methyl modified nucleotide
  modified_base 69: mod_base = OTHER; note = 2'-O-methyl modified nucleotide
  modified_base 70: mod_base = OTHER; note = 2'-O-methyl modified nucleotide
  modified_base 75: mod_base = OTHER; note = 2'-O-methyl modified nucleotide
  modified_base 77: mod_base = OTHER; note = 2'-O-methyl modified nucleotide
  modified_base 80: mod_base = OTHER; note = 2'-O-methyl modified nucleotide
  modified_base 86: mod_base = OTHER; note = 2'-O-methyl modified nucleotide
  modified_base 87: mod_base = OTHER; note = 2'-O-methyl modified nucleotide
  modified_base 89: mod_base = OTHER; note = 2'-O-methyl modified nucleotide
  modified_base 90: mod_base = OTHER; note = 2'-O-methyl modified nucleotide
  modified_base 91: mod_base = OTHER; note = 2'-O-methyl modified nucleotide
  modified_base 92: mod_base = OTHER; note = 2'-O-methyl modified nucleotide
  modified_base 99: mod_base = OTHER; note = nucleotide with phosphorothioate linkage
  modified_base 100: mod_base = OTHER; note = 2'-O-methyl modified nucleotide with phosphorothioate linkage
  modified_base 101: mod_base = OTHER; note = 2'-O-methyl modified nucleotide

SEQ ID NO: 2110 - RNA, 101 nt, synthetic construct; identical to SEQ ID NO: 1110
  source 1..101: mol_type = other RNA
  modified_base 1: mod_base = OTHER; note = 2'-O-methyl modified nucleotide with phosphorothioate linkage
  modified_base 2: mod_base = OTHER; note = 2'-O-methyl modified nucleotide with phosphorothioate linkage
  modified_base 3: mod_base = OTHER; note = 2'-O-methyl modified nucleotide with phosphorothioate linkage
  modified_base 4: mod_base = OTHER; note = 2'-O-methyl modified nucleotide
  modified_base 5: mod_base = OTHER; note = 2'-O-methyl modified nucleotide
  modified_base 8: mod_base = OTHER; note = 2'-O-methyl modified nucleotide
  modified_base 9: mod_base = OTHER; note = 2'-O-methyl modified nucleotide
  modified_base 11: mod_base = OTHER; note = 2'-O-methyl modified nucleotide
  modified_base 13: mod_base = OTHER; note = 2'-O-methyl modified nucleotide
  modified_base 18: mod_base = OTHER; note = 2'-O-methyl modified nucleotide
  modified_base 22: mod_base = OTHER; note = 2'-O-methyl modified nucleotide
  modified_base 25: mod_base = OTHER; note = 2'-O-methyl modified nucleotide
  modified_base 29: mod_base = OTHER; note = 2'-O-methyl modified nucleotide
  modified_base 30: mod_base = OTHER; note = 2'-O-methyl modified nucleotide
  modified_base 31: mod_base = OTHER; note = 2'-O-methyl modified nucleotide
  modified_base 32: mod_base = OTHER; note = 2'-O-methyl modified nucleotide
  modified_base 37: mod_base = OTHER; note = 2'-O-methyl modified nucleotide
  modified_base 38: mod_base = OTHER; note = 2'-O-methyl modified nucleotide
  modified_base 39: mod_base = OTHER; note = 2'-O-methyl modified nucleotide
  modified_base 40: mod_base = OTHER; note = 2'-O-methyl modified nucleotide
  modified_base 41: mod_base = OTHER; note = 2'-O-methyl modified nucleotide
  modified_base 42: mod_base = OTHER; note = 2'-O-methyl modified nucleotide
  modified_base 43: mod_base = OTHER; note = 2'-O-methyl modified nucleotide
  modified_base 47: mod_base = OTHER; note = 2'-O-methyl modified nucleotide
  modified_base 48: mod_base = OTHER; note = 2'-O-methyl modified nucleotide
  modified_base 51: mod_base = OTHER; note = 2'-O-methyl modified nucleotide
  modified_base 54: mod_base = OTHER; note = nucleotide with phosphorothioate linkage
  modified_base 58: mod_base = OTHER; note = 2'-O-methyl modified nucleotide
  modified_base 59: mod_base = OTHER; note = 2'-O-methyl modified nucleotide
  modified_base 61: mod_base = OTHER; note = 2'-O-methyl modified nucleotide
  modified_base 62: mod_base = OTHER; note = 2'-O-methyl modified nucleotide
  modified_base 63: mod_base = OTHER; note = 2'-O-methyl modified nucleotide
  modified_base 64: mod_base = OTHER; note = 2'-O-methyl modified nucleotide
  modified_base 65: mod_base = OTHER; note = 2'-O-methyl modified nucleotide
  modified_base 66: mod_base = OTHER; note = 2'-O-methyl modified nucleotide
  modified_base 67: mod_base = OTHER; note = 2'-O-methyl modified nucleotide
  modified_base 68: mod_base = OTHER; note = 2'-O-methyl modified nucleotide
  modified_base 69: mod_base = OTHER; note = 2'-O-methyl modified nucleotide
  modified_base 70: mod_base = OTHER; note = 2'-O-methyl modified nucleotide
  modified_base 75: mod_base = OTHER; note = 2'-O-methyl modified nucleotide
  modified_base 77: mod_base = OTHER; note = 2'-O-methyl modified nucleotide
  modified_base 80: mod_base = OTHER; note = 2'-O-methyl modified nucleotide
  modified_base 86: mod_base = OTHER; note = 2'-O-methyl modified nucleotide
  modified_base 87: mod_base = OTHER; note = 2'-O-methyl modified nucleotide
  modified_base 89: mod_base = OTHER; note = 2'-O-methyl modified nucleotide
  modified_base 90: mod_base = OTHER; note = 2'-O-methyl modified nucleotide
  modified_base 91: mod_base = OTHER; note = 2'-O-methyl modified nucleotide
  modified_base 92: mod_base = OTHER; note = 2'-O-methyl modified nucleotide
  modified_base 99: mod_base = OTHER; note = nucleotide with phosphorothioate linkage
  modified_base 100: mod_base = OTHER; note = 2'-O-methyl modified nucleotide with phosphorothioate linkage
  modified_base 101: mod_base = OTHER; note = 2'-O-methyl modified nucleotide

SEQ ID NO: 2111 - RNA, 101 nt, synthetic construct; identical to SEQ ID NO: 1111
  source 1..101: mol_type = other RNA
  modified_base 1: mod_base = OTHER; note = 2'-O-methyl modified nucleotide with phosphorothioate linkage
  modified_base 2: mod_base = OTHER; note = 2'-O-methyl modified nucleotide with phosphorothioate linkage
  modified_base 3: mod_base = OTHER; note = 2'-O-methyl modified nucleotide with phosphorothioate linkage
  modified_base 4: mod_base = OTHER; note = 2'-O-methyl modified nucleotide
  modified_base 5: mod_base = OTHER; note = 2'-O-methyl modified nucleotide
  modified_base 8: mod_base = OTHER; note = 2'-O-methyl modified nucleotide
  modified_base 9: mod_base = OTHER; note = 2'-O-methyl modified nucleotide
  modified_base 11: mod_base = OTHER; note = 2'-O-methyl modified nucleotide
  modified_base 13: mod_base = OTHER; note = 2'-O-methyl modified nucleotide
  modified_base 18: mod_base = OTHER; note = 2'-O-methyl modified nucleotide
  modified_base 22: mod_base = OTHER; note = 2'-O-methyl modified nucleotide
  modified_base 25: mod_base = OTHER; note = 2'-O-methyl modified nucleotide
  modified_base 29: mod_base = OTHER; note = 2'-O-methyl modified nucleotide
  modified_base 30: mod_base = OTHER; note = 2'-O-methyl modified nucleotide
  modified_base 31: mod_base = OTHER; note = 2'-O-methyl modified nucleotide
  modified_base 32: mod_base = OTHER; note = 2'-O-methyl modified nucleotide
  modified_base 37: mod_base = OTHER; note = 2'-O-methyl modified nucleotide
  modified_base 38: mod_base = OTHER; note = 2'-O-methyl modified nucleotide
  modified_base 39: mod_base = OTHER; note = 2'-O-methyl modified nucleotide
  modified_base 40: mod_base = OTHER; note = 2'-O-methyl modified nucleotide
  modified_base 41: mod_base = OTHER; note = 2'-O-methyl modified nucleotide
  modified_base 42: mod_base = OTHER; note = 2'-O-methyl modified nucleotide
  modified_base 43: mod_base = OTHER; note = 2'-O-methyl modified nucleotide
  modified_base 47: mod_base = OTHER; note = 2'-O-methyl modified nucleotide
  modified_base 48: mod_base = OTHER; note = 2'-O-methyl modified nucleotide
  modified_base 51: mod_base = OTHER; note = 2'-O-methyl modified nucleotide
  modified_base 54: mod_base = OTHER; note = nucleotide with phosphorothioate linkage
  modified_base 58: mod_base = OTHER; note = 2'-O-methyl modified nucleotide
  modified_base 59: mod_base = OTHER; note = 2'-O-methyl modified nucleotide
  modified_base 61: mod_base = OTHER; note = 2'-O-methyl modified nucleotide
  modified_base 62: mod_base = OTHER; note = 2'-O-methyl modified nucleotide
  modified_base 63: mod_base = OTHER; note = 2'-O-methyl modified nucleotide
  modified_base 64: mod_base = OTHER; note = 2'-O-methyl modified nucleotide
  modified_base 65: mod_base = OTHER; note = 2'-O-methyl modified nucleotide
  modified_base 66: mod_base = OTHER; note = 2'-O-methyl modified nucleotide
  modified_base 67: mod_base = OTHER; note = 2'-O-methyl modified nucleotide
  modified_base 68: mod_base = OTHER; note = 2'-O-methyl modified nucleotide
  modified_base 69: mod_base = OTHER; note = 2'-O-methyl modified nucleotide
  modified_base 70: mod_base = OTHER; note = 2'-O-methyl modified nucleotide
  modified_base 75: mod_base = OTHER; note = 2'-O-methyl modified nucleotide
  modified_base 77: mod_base = OTHER; note = 2'-O-methyl modified nucleotide
  modified_base 80: mod_base = OTHER; note = 2'-O-methyl modified nucleotide
  modified_base 86: mod_base = OTHER; note = 2'-O-methyl modified nucleotide
  modified_base 87: mod_base = OTHER; note = 2'-O-methyl modified nucleotide
  modified_base 89: mod_base = OTHER; note = 2'-O-methyl modified nucleotide
  modified_base 90: mod_base = OTHER; note = 2'-O-methyl modified nucleotide
  modified_base 91: mod_base = OTHER; note = 2'-O-methyl modified nucleotide
  modified_base 92: mod_base = OTHER; note = 2'-O-methyl modified nucleotide
  modified_base 99: mod_base = OTHER; note = nucleotide with phosphorothioate linkage
  modified_base 100: mod_base = OTHER; note = 2'-O-methyl modified nucleotide with phosphorothioate linkage
  modified_base 101: mod_base = OTHER; note = 2'-O-methyl modified nucleotide

SEQ ID NO: 2112 - RNA, 101 nt, synthetic construct; identical to SEQ ID NO: 1112
  source 1..101: mol_type = other RNA
  modified_base 1: mod_base = OTHER; note = 2'-O-methyl modified nucleotide with phosphorothioate linkage
  modified_base 2: mod_base = OTHER; note = 2'-O-methyl modified nucleotide with phosphorothioate linkage
  modified_base 3: mod_base = OTHER; note = 2'-O-methyl modified nucleotide with phosphorothioate linkage
  modified_base 4: mod_base = OTHER; note = 2'-O-methyl modified nucleotide
  modified_base 5: mod_base = OTHER; note = 2'-O-methyl modified nucleotide
  modified_base 8: mod_base = OTHER; note = 2'-O-methyl modified nucleotide
  modified_base 9: mod_base = OTHER; note = 2'-O-methyl modified nucleotide
  modified_base 11: mod_base = OTHER; note = 2'-O-methyl modified nucleotide
  modified_base 13: mod_base = OTHER; note = 2'-O-methyl modified nucleotide
  modified_base 18: mod_base = OTHER; note = 2'-O-methyl modified nucleotide
  modified_base 22: mod_base = OTHER; note = 2'-O-methyl modified nucleotide
  modified_base 25: mod_base = OTHER; note = 2'-O-methyl modified nucleotide
  modified_base 29: mod_base = OTHER; note = 2'-O-methyl modified nucleotide
  modified_base 30: mod_base = OTHER; note = 2'-O-methyl modified nucleotide
  modified_base 31: mod_base = OTHER; note = 2'-O-methyl modified nucleotide
  modified_base 32: mod_base = OTHER; note = 2'-O-methyl modified nucleotide
  modified_base 37: mod_base = OTHER; note = 2'-O-methyl modified nucleotide
  modified_base 38: mod_base = OTHER; note = 2'-O-methyl modified nucleotide
  modified_base 39: mod_base = OTHER; note = 2'-O-methyl modified nucleotide
  modified_base 40: mod_base = OTHER; note = 2'-O-methyl modified nucleotide
  modified_base 41: mod_base = OTHER; note = 2'-O-methyl modified nucleotide
  modified_base 42: mod_base = OTHER; note = 2'-O-methyl modified nucleotide
  modified_base 43: mod_base = OTHER; note = 2'-O-methyl modified nucleotide
  modified_base 47: mod_base = OTHER; note = 2'-O-methyl modified nucleotide
  modified_base 48: mod_base = OTHER; note = 2'-O-methyl modified nucleotide
  modified_base 51: mod_base = OTHER; note = 2'-O-methyl modified nucleotide
  modified_base 54: mod_base = OTHER; note = nucleotide with phosphorothioate linkage
  modified_base 58: mod_base = OTHER; note = 2'-O-methyl modified nucleotide
  modified_base 59: mod_base = OTHER; note = 2'-O-methyl modified nucleotide
  modified_base 61: mod_base = OTHER; note = 2'-O-methyl modified nucleotide
  modified_base 62: mod_base = OTHER; note = 2'-O-methyl modified nucleotide
  modified_base 63: mod_base = OTHER; note = 2'-O-methyl modified nucleotide
  modified_base 64: mod_base = OTHER; note = 2'-O-methyl modified nucleotide
  modified_base 65: mod_base = OTHER; note = 2'-O-methyl modified nucleotide
  modified_base 66: mod_base = OTHER; note = 2'-O-methyl modified nucleotide
  modified_base 67: mod_base = OTHER; note = 2'-O-methyl modified nucleotide
  modified_base 68: mod_base = OTHER; note = 2'-O-methyl modified nucleotide
  modified_base 69: mod_base = OTHER; note = 2'-O-methyl modified nucleotide
  modified_base 70: mod_base = OTHER; note = 2'-O-methyl modified nucleotide
  modified_base 75: mod_base = OTHER; note = 2'-O-methyl modified nucleotide
  modified_base 77: mod_base = OTHER; note = 2'-O-methyl modified nucleotide
  modified_base 80: mod_base = OTHER; note = 2'-O-methyl modified nucleotide
  modified_base 86: mod_base = OTHER; note = 2'-O-methyl modified nucleotide
  modified_base 87: mod_base = OTHER; note = 2'-O-methyl modified nucleotide
  modified_base 89: mod_base = OTHER; note = 2'-O-methyl modified nucleotide
  modified_base 90: mod_base = OTHER; note = 2'-O-methyl modified nucleotide
  modified_base 91: mod_base = OTHER; note = 2'-O-methyl modified nucleotide
  modified_base 92: mod_base = OTHER; note = 2'-O-methyl modified nucleotide
  modified_base 99: mod_base = OTHER; note = nucleotide with phosphorothioate linkage
  modified_base 100: mod_base = OTHER; note = 2'-O-methyl modified nucleotide with phosphorothioate linkage
  modified_base 101: mod_base = OTHER; note = 2'-O-methyl modified nucleotide

SEQ ID NO: 2113 - RNA, 101 nt, synthetic construct; identical to SEQ ID NO: 1113
  source 1..101: mol_type = other RNA
  modified_base 1: mod_base = OTHER; note = 2'-O-methyl modified nucleotide with phosphorothioate linkage
  modified_base 2: mod_base = OTHER; note = 2'-O-methyl modified nucleotide with phosphorothioate linkage
  modified_base 3: mod_base = OTHER; note = 2'-O-methyl modified nucleotide with phosphorothioate linkage
  modified_base 4: mod_base = OTHER; note = 2'-O-methyl modified nucleotide
  modified_base 5: mod_base = OTHER; note = 2'-O-methyl modified nucleotide
  modified_base 8: mod_base = OTHER; note = 2'-O-methyl modified nucleotide
  modified_base 9: mod_base = OTHER; note = 2'-O-methyl modified nucleotide
  modified_base 11: mod_base = OTHER; note = 2'-O-methyl modified nucleotide
  modified_base 13: mod_base = OTHER; note = 2'-O-methyl modified nucleotide
  modified_base 18: mod_base = OTHER; note = 2'-O-methyl modified nucleotide
  modified_base 22: mod_base = OTHER; note = 2'-O-methyl modified nucleotide
  modified_base 25: mod_base = OTHER; note = 2'-O-methyl modified nucleotide
  modified_base 29: mod_base = OTHER; note = 2'-O-methyl modified nucleotide
  modified_base 30: mod_base = OTHER; note = 2'-O-methyl modified nucleotide
  modified_base 31: mod_base = OTHER; note = 2'-O-methyl modified nucleotide
  modified_base 32: mod_base = OTHER; note = 2'-O-methyl modified nucleotide
  modified_base 37: mod_base = OTHER; note = 2'-O-methyl modified nucleotide
  modified_base 38: mod_base = OTHER; note = 2'-O-methyl modified nucleotide
  modified_base 39: mod_base = OTHER; note = 2'-O-methyl modified nucleotide
  modified_base 40: mod_base = OTHER; note = 2'-O-methyl modified nucleotide
  modified_base 41: mod_base = OTHER; note = 2'-O-methyl modified nucleotide
  modified_base 42: mod_base = OTHER; note = 2'-O-methyl modified nucleotide
  modified_base 43: mod_base = OTHER; note = 2'-O-methyl modified nucleotide
  modified_base 47: mod_base = OTHER; note = 2'-O-methyl modified nucleotide
  modified_base 48: mod_base = OTHER; note = 2'-O-methyl modified nucleotide
  modified_base 51: mod_base = OTHER; note = 2'-O-methyl modified nucleotide
  modified_base 54: mod_base = OTHER; note = nucleotide with phosphorothioate linkage
  modified_base 58: mod_base = OTHER; note = 2'-O-methyl modified nucleotide
  modified_base 59: mod_base = OTHER; note = 2'-O-methyl modified nucleotide
  modified_base 61: mod_base = OTHER; note = 2'-O-methyl modified nucleotide
  modified_base 62: mod_base = OTHER; note = 2'-O-methyl modified nucleotide
  modified_base 63: mod_base = OTHER; note = 2'-O-methyl modified nucleotide
  modified_base 64: mod_base = OTHER; note = 2'-O-methyl modified nucleotide
  modified_base 65: mod_base = OTHER; note = 2'-O-methyl modified nucleotide
  modified_base 66: mod_base = OTHER; note = 2'-O-methyl modified nucleotide
  modified_base 67: mod_base = OTHER; note = 2'-O-methyl modified nucleotide
  modified_base 68: mod_base = OTHER; note = 2'-O-methyl modified nucleotide
  modified_base 69: mod_base = OTHER; note = 2'-O-methyl modified nucleotide
  modified_base 70: mod_base = OTHER; note = 2'-O-methyl modified nucleotide
  modified_base 75: mod_base = OTHER; note = 2'-O-methyl modified nucleotide
  modified_base 77: mod_base = OTHER; note = 2'-O-methyl modified nucleotide
  modified_base 80: mod_base = OTHER; note = 2'-O-methyl modified nucleotide
  modified_base 86: mod_base = OTHER; note = 2'-O-methyl modified nucleotide
  modified_base 87: mod_base = OTHER; note = 2'-O-methyl modified nucleotide
  modified_base 89: mod_base = OTHER; note = 2'-O-methyl modified nucleotide
  modified_base 90: mod_base = OTHER; note = 2'-O-methyl modified nucleotide
  modified_base 91: mod_base = OTHER; note = 2'-O-methyl modified nucleotide
  modified_base 92: mod_base = OTHER; note = 2'-O-methyl modified nucleotide
  modified_base 99: mod_base = OTHER; note = nucleotide with phosphorothioate linkage
  modified_base 100: mod_base = OTHER; note = 2'-O-methyl modified nucleotide with phosphorothioate linkage
  modified_base 101: mod_base = OTHER; note = 2'-O-methyl modified nucleotide

SEQ ID NO: 2114 - RNA, 101 nt, synthetic construct; identical to SEQ ID NO: 1114
  source 1..101: mol_type = other RNA
  modified_base 1: mod_base = OTHER; note = 2'-O-methyl modified nucleotide with phosphorothioate linkage
  modified_base 2: mod_base = OTHER; note = 2'-O-methyl modified nucleotide with phosphorothioate linkage
  modified_base 3: mod_base = OTHER; note = 2'-O-methyl modified nucleotide with phosphorothioate linkage
  modified_base 4: mod_base = OTHER; note = 2'-O-methyl modified nucleotide
  modified_base 5: mod_base = OTHER; note = 2'-O-methyl modified nucleotide
  modified_base 8: mod_base = OTHER; note = 2'-O-methyl modified nucleotide
  modified_base 9: mod_base = OTHER; note = 2'-O-methyl modified nucleotide
  modified_base 11: mod_base = OTHER; note = 2'-O-methyl modified nucleotide
  modified_base 13: mod_base = OTHER; note = 2'-O-methyl modified nucleotide
  modified_base 18: mod_base = OTHER; note = 2'-O-methyl modified nucleotide
  modified_base 22: mod_base = OTHER; note = 2'-O-methyl modified nucleotide
  modified_base 25: mod_base = OTHER; note = 2'-O-methyl modified nucleotide
  modified_base 29: mod_base = OTHER; note = 2'-O-methyl modified nucleotide
  modified_base 30: mod_base = OTHER; note = 2'-O-methyl modified nucleotide
  modified_base 31: mod_base = OTHER; note = 2'-O-methyl modified nucleotide
  modified_base 32: mod_base = OTHER; note = 2'-O-methyl modified nucleotide
  modified_base 37: mod_base = OTHER; note = 2'-O-methyl modified nucleotide
  modified_base 38: mod_base = OTHER; note = 2'-O-methyl modified nucleotide
  modified_base 39: mod_base = OTHER; note = 2'-O-methyl modified nucleotide
  modified_base 40: mod_base = OTHER; note = 2'-O-methyl modified nucleotide
  modified_base 41: mod_base = OTHER; note = 2'-O-methyl modified nucleotide
  modified_base 42: mod_base = OTHER; note = 2'-O-methyl modified nucleotide
  modified_base 43: mod_base = OTHER; note = 2'-O-methyl modified nucleotide
  modified_base 47: mod_base = OTHER; note = 2'-O-methyl modified nucleotide
  modified_base 48: mod_base = OTHER; note = 2'-O-methyl modified nucleotide
  modified_base 51: mod_base = OTHER; note = 2'-O-methyl modified nucleotide
  modified_base 54: mod_base = OTHER; note = nucleotide with phosphorothioate linkage
  modified_base 58: mod_base = OTHER; note = 2'-O-methyl modified nucleotide
  modified_base 59: mod_base = OTHER; note = 2'-O-methyl modified nucleotide
  modified_base 61: mod_base = OTHER; note = 2'-O-methyl modified nucleotide
  modified_base 62: mod_base = OTHER; note = 2'-O-methyl modified nucleotide
  modified_base 63: mod_base = OTHER; note = 2'-O-methyl modified nucleotide
  modified_base 64: mod_base = OTHER; note = 2'-O-methyl modified nucleotide
  modified_base 65: mod_base = OTHER; note = 2'-O-methyl modified nucleotide
  modified_base 66: mod_base = OTHER; note = 2'-O-methyl modified nucleotide
  modified_base 67: mod_base = OTHER; note = 2'-O-methyl modified nucleotide
  modified_base 68: mod_base = OTHER; note = 2'-O-methyl modified nucleotide
  modified_base 69: mod_base = OTHER; note = 2'-O-methyl modified nucleotide
  modified_base 70: mod_base = OTHER; note = 2'-O-methyl modified nucleotide
  modified_base 75: mod_base = OTHER; note = 2'-O-methyl modified nucleotide
  modified_base 77: mod_base = OTHER; note = 2'-O-methyl modified nucleotide
  modified_base 80: mod_base = OTHER; note = 2'-O-methyl modified nucleotide
  modified_base 86: mod_base = OTHER; note = 2'-O-methyl modified nucleotide
  modified_base 87: mod_base = OTHER; note = 2'-O-methyl modified nucleotide
  modified_base 89: mod_base = OTHER; note = 2'-O-methyl modified nucleotide
  modified_base 90: mod_base = OTHER; note = 2'-O-methyl modified nucleotide
  modified_base 91: mod_base = OTHER; note = 2'-O-methyl modified nucleotide
  modified_base 92: mod_base = OTHER; note = 2'-O-methyl modified nucleotide
  modified_base 99: mod_base = OTHER; note = nucleotide with phosphorothioate linkage
  modified_base 100: mod_base = OTHER; note = 2'-O-methyl modified nucleotide with phosphorothioate linkage
  modified_base 101: mod_base = OTHER; note = 2'-O-methyl modified nucleotide

SEQ ID NO: 2115 - RNA, 101 nt, synthetic construct; identical to SEQ ID NO: 1115
  source 1..101: mol_type = other RNA
  modified_base 1: mod_base = OTHER; note = 2'-O-methyl modified nucleotide with phosphorothioate linkage
  modified_base 2: mod_base = OTHER; note = 2'-O-methyl modified nucleotide with phosphorothioate linkage
  modified_base 3: mod_base = OTHER; note = 2'-O-methyl modified nucleotide with phosphorothioate linkage
  modified_base 4: mod_base = OTHER; note = 2'-O-methyl modified nucleotide
  modified_base 5: mod_base = OTHER; note = 2'-O-methyl modified nucleotide
  modified_base 8: mod_base = OTHER; note = 2'-O-methyl modified nucleotide
  modified_base 9: mod_base = OTHER; note = 2'-O-methyl modified nucleotide
  modified_base 11: mod_base = OTHER; note = 2'-O-methyl modified nucleotide
  modified_base 13: mod_base = OTHER; note = 2'-O-methyl modified nucleotide
  modified_base 18: mod_base = OTHER; note = 2'-O-methyl modified nucleotide
  modified_base 22: mod_base = OTHER; note = 2'-O-methyl modified nucleotide
  modified_base 25: mod_base = OTHER; note = 2'-O-methyl modified nucleotide
  modified_base 29: mod_base = OTHER; note = 2'-O-methyl modified nucleotide
  modified_base 30: mod_base = OTHER; note = 2'-O-methyl modified nucleotide
  modified_base 31: mod_base = OTHER; note = 2'-O-methyl modified nucleotide
  modified_base 32: mod_base = OTHER; note = 2'-O-methyl modified nucleotide
  modified_base 37: mod_base = OTHER; note = 2'-O-methyl modified nucleotide
  modified_base 38: mod_base = OTHER; note = 2'-O-methyl modified nucleotide
  modified_base 39: mod_base = OTHER; note = 2'-O-methyl modified nucleotide
  modified_base 40: mod_base = OTHER; note = 2'-O-methyl modified nucleotide
  modified_base 41: mod_base = OTHER; note = 2'-O-methyl modified nucleotide
  modified_base 42: mod_base = OTHER; note = 2'-O-methyl modified nucleotide
  modified_base 43: mod_base = OTHER; note = 2'-O-methyl modified nucleotide
  modified_base 47: mod_base = OTHER; note = 2'-O-methyl modified nucleotide
  modified_base 48: mod_base = OTHER; note = 2'-O-methyl modified nucleotide
  modified_base 51: mod_base = OTHER; note = 2'-O-methyl modified nucleotide
  modified_base 54: mod_base = OTHER; note = nucleotide with phosphorothioate linkage
  modified_base 58: mod_base = OTHER; note = 2'-O-methyl modified nucleotide
  modified_base 59: mod_base = OTHER; note = 2'-O-methyl modified nucleotide
  modified_base 61: mod_base = OTHER; note = 2'-O-methyl modified nucleotide
  modified_base 62: mod_base = OTHER; note = 2'-O-methyl modified nucleotide
  modified_base 63: mod_base = OTHER; note = 2'-O-methyl modified nucleotide
  modified_base 64: mod_base = OTHER; note = 2'-O-methyl modified nucleotide
  modified_base 65: mod_base = OTHER; note = 2'-O-methyl modified nucleotide
  modified_base 66: mod_base = OTHER; note = 2'-O-methyl modified nucleotide
  modified_base 67: mod_base = OTHER; note = 2'-O-methyl modified nucleotide
  modified_base 68: mod_base = OTHER; note = 2'-O-methyl modified nucleotide
  modified_base 69: mod_base = OTHER; note = 2'-O-methyl modified nucleotide
  modified_base 70: mod_base = OTHER; note = 2'-O-methyl modified nucleotide
  modified_base 75: mod_base = OTHER; note = 2'-O-methyl modified nucleotide
  modified_base 77: mod_base = OTHER; note = 2'-O-methyl modified nucleotide
  modified_base 80: mod_base = OTHER; note = 2'-O-methyl modified nucleotide
  modified_base 86: mod_base = OTHER; note = 2'-O-methyl modified nucleotide
  modified_base 87: mod_base = OTHER; note = 2'-O-methyl modified nucleotide
  modified_base 89: mod_base = OTHER; note = 2'-O-methyl modified nucleotide
  modified_base 90: mod_base = OTHER; note = 2'-O-methyl modified nucleotide
  modified_base 91: mod_base = OTHER; note = 2'-O-methyl modified nucleotide
  modified_base 92: mod_base = OTHER; note = 2'-O-methyl modified nucleotide
  modified_base 99: mod_base = OTHER; note = nucleotide with phosphorothioate linkage
  modified_base 100: mod_base = OTHER; note = 2'-O-methyl modified nucleotide with phosphorothioate linkage
  modified_base 101: mod_base = OTHER; note = 2'-O-methyl modified nucleotide

SEQ ID NO: 2116 - RNA, 101 nt, synthetic construct; identical to SEQ ID NO: 1116
  source 1..101: mol_type = other RNA
  modified_base 1: mod_base = OTHER; note = 2'-O-methyl modified nucleotide with phosphorothioate linkage
  modified_base 2: mod_base = OTHER; note = 2'-O-methyl modified nucleotide with phosphorothioate linkage
  modified_base 3: mod_base = OTHER; note = 2'-O-methyl modified nucleotide with phosphorothioate linkage
  modified_base 4: mod_base = OTHER; note = 2'-O-methyl modified nucleotide
  modified_base 5: mod_base = OTHER; note = 2'-O-methyl modified nucleotide
  modified_base 8: mod_base = OTHER; note = 2'-O-methyl modified nucleotide
  modified_base 9: mod_base = OTHER; note = 2'-O-methyl modified nucleotide
  modified_base 11: mod_base = OTHER; note = 2'-O-methyl modified nucleotide
  modified_base 13: mod_base = OTHER; note = 2'-O-methyl modified nucleotide
  modified_base 18: mod_base = OTHER; note = 2'-O-methyl modified nucleotide
  modified_base 22: mod_base = OTHER; note = 2'-O-methyl modified nucleotide
  modified_base 25: mod_base = OTHER; note = 2'-O-methyl modified nucleotide
  modified_base 29: mod_base = OTHER; note = 2'-O-methyl modified nucleotide
  modified_base 30: mod_base = OTHER; note = 2'-O-methyl modified nucleotide
  modified_base 31: mod_base = OTHER; note = 2'-O-methyl modified nucleotide
  modified_base 32: mod_base = OTHER; note = 2'-O-methyl modified nucleotide
  modified_base 37: mod_base = OTHER; note = 2'-O-methyl modified nucleotide
  modified_base 38: mod_base = OTHER; note = 2'-O-methyl modified nucleotide
  modified_base 39: mod_base = OTHER; note = 2'-O-methyl modified nucleotide
  modified_base 40: mod_base = OTHER; note = 2'-O-methyl modified nucleotide
  modified_base 41: mod_base = OTHER; note = 2'-O-methyl modified nucleotide
  modified_base 42: mod_base = OTHER; note = 2'-O-methyl modified nucleotide
  modified_base 43: mod_base = OTHER; note = 2'-O-methyl modified nucleotide
  modified_base 47: mod_base = OTHER; note = 2'-O-methyl modified nucleotide
  modified_base 48: mod_base = OTHER; note = 2'-O-methyl modified nucleotide
  modified_base 51: mod_base = OTHER; note = 2'-O-methyl modified nucleotide
  modified_base 54: mod_base = OTHER; note = nucleotide with phosphorothioate linkage
  modified_base 58: mod_base = OTHER; note = 2'-O-methyl modified nucleotide
  modified_base 59: mod_base = OTHER; note = 2'-O-methyl modified nucleotide
  modified_base 61: mod_base = OTHER; note = 2'-O-methyl modified nucleotide
  modified_base 62: mod_base = OTHER; note = 2'-O-methyl modified nucleotide
  modified_base 63: mod_base = OTHER; note = 2'-O-methyl modified nucleotide
  modified_base 64: mod_base = OTHER; note = 2'-O-methyl modified nucleotide
  modified_base 65: mod_base = OTHER; note = 2'-O-methyl modified nucleotide
  modified_base 66: mod_base = OTHER; note = 2'-O-methyl modified nucleotide
  modified_base 67: mod_base = OTHER; note = 2'-O-methyl modified nucleotide
  modified_base 68: mod_base = OTHER; note = 2'-O-methyl modified nucleotide
  modified_base 69: mod_base = OTHER; note = 2'-O-methyl modified nucleotide
  modified_base 70: mod_base = OTHER; note = 2'-O-methyl modified nucleotide
  modified_base 75: mod_base = OTHER; note = 2'-O-methyl modified nucleotide
  modified_base 77: mod_base = OTHER; note = 2'-O-methyl modified nucleotide
  modified_base 80: mod_base = OTHER; note = 2'-O-methyl modified nucleotide
  modified_base 86: mod_base = OTHER; note = 2'-O-methyl modified nucleotide
  modified_base 87: mod_base = OTHER; note = 2'-O-methyl modified nucleotide
  modified_base 89: mod_base = OTHER; note = 2'-O-methyl modified nucleotide
  modified_base 90: mod_base = OTHER; note = 2'-O-methyl modified nucleotide
  modified_base 91: mod_base = OTHER; note = 2'-O-methyl modified nucleotide
  modified_base 92: mod_base = OTHER; note = 2'-O-methyl modified nucleotide
  modified_base 99: mod_base = OTHER; note = nucleotide with phosphorothioate linkage
  modified_base 100: mod_base = OTHER; note = 2'-O-methyl modified nucleotide with phosphorothioate linkage
  modified_base 101: mod_base = OTHER; note = 2'-O-methyl modified nucleotide

SEQ ID NO: 2117 - RNA, 101 nt, synthetic construct; identical to SEQ ID NO: 1117
  source 1..101: mol_type = other RNA
  modified_base 1: mod_base = OTHER; note = 2'-O-methyl modified nucleotide with phosphorothioate linkage
  modified_base 2: mod_base = OTHER; note = 2'-O-methyl modified nucleotide with phosphorothioate linkage
  modified_base 3: mod_base = OTHER; note = 2'-O-methyl modified nucleotide with phosphorothioate linkage
  modified_base 4: mod_base = OTHER; note = 2'-O-methyl modified nucleotide
  modified_base 5: mod_base = OTHER; note = 2'-O-methyl modified nucleotide
  modified_base 8: mod_base = OTHER; note = 2'-O-methyl modified nucleotide
  modified_base 9: mod_base = OTHER; note = 2'-O-methyl modified nucleotide
  modified_base 11: mod_base = OTHER; note = 2'-O-methyl modified nucleotide
  modified_base 13: mod_base = OTHER; note = 2'-O-methyl modified nucleotide
  modified_base 18: mod_base = OTHER; note = 2'-O-methyl modified nucleotide
  modified_base 22: mod_base = OTHER; note = 2'-O-methyl modified nucleotide
  modified_base 25: mod_base = OTHER; note = 2'-O-methyl modified nucleotide
  modified_base 29: mod_base = OTHER; note = 2'-O-methyl modified nucleotide
  modified_base 30: mod_base = OTHER; note = 2'-O-methyl modified nucleotide
  modified_base 31: mod_base = OTHER; note = 2'-O-methyl modified nucleotide
  modified_base 32: mod_base = OTHER; note = 2'-O-methyl modified nucleotide
  modified_base 37: mod_base = OTHER; note = 2'-O-methyl modified nucleotide
  modified_base 38: mod_base = OTHER; note = 2'-O-methyl modified nucleotide
  modified_base 39: mod_base = OTHER; note = 2'-O-methyl modified nucleotide
  modified_base 40: mod_base = OTHER; note = 2'-O-methyl modified nucleotide
  modified_base 41: mod_base = OTHER; note = 2'-O-methyl modified nucleotide
  modified_base 42: mod_base = OTHER; note = 2'-O-methyl modified nucleotide
  modified_base 43: mod_base = OTHER; note = 2'-O-methyl modified nucleotide
  modified_base 47: mod_base = OTHER; note = 2'-O-methyl modified nucleotide
  modified_base 48: mod_base = OTHER; note = 2'-O-methyl modified nucleotide
  modified_base 51: mod_base = OTHER; note = 2'-O-methyl modified nucleotide
  modified_base 54: mod_base = OTHER; note = nucleotide with phosphorothioate linkage
  modified_base 58: mod_base = OTHER; note = 2'-O-methyl modified nucleotide
  modified_base 59: mod_base = OTHER; note = 2'-O-methyl modified nucleotide
  modified_base 61: mod_base = OTHER; note = 2'-O-methyl modified nucleotide
  modified_base 62: mod_base = OTHER; note = 2'-O-methyl modified nucleotide
  modified_base 63: mod_base = OTHER; note = 2'-O-methyl modified nucleotide
  modified_base 64: mod_base = OTHER; note = 2'-O-methyl modified nucleotide
  modified_base 65: mod_base = OTHER; note = 2'-O-methyl modified nucleotide
  modified_base 66: mod_base = OTHER; note = 2'-O-methyl modified nucleotide
  modified_base 67: mod_base = OTHER; note = 2'-O-methyl modified nucleotide
  modified_base 68: mod_base = OTHER; note = 2'-O-methyl modified nucleotide
  modified_base 69: mod_base = OTHER; note = 2'-O-methyl modified nucleotide
  modified_base 70: mod_base = OTHER; note = 2'-O-methyl modified nucleotide
  modified_base 75: mod_base = OTHER; note = 2'-O-methyl modified nucleotide
  modified_base 77: mod_base = OTHER; note = 2'-O-methyl modified nucleotide
  modified_base 80: mod_base = OTHER; note = 2'-O-methyl modified nucleotide
  modified_base 86: mod_base = OTHER; note = 2'-O-methyl modified nucleotide
  modified_base 87: mod_base = OTHER; note = 2'-O-methyl modified nucleotide
  modified_base 89: mod_base = OTHER; note = 2'-O-methyl modified nucleotide
  modified_base 90: mod_base = OTHER; note = 2'-O-methyl modified nucleotide
  modified_base 91: mod_base = OTHER; note = 2'-O-methyl modified nucleotide
  modified_base 92: mod_base = OTHER; note = 2'-O-methyl modified nucleotide
  modified_base 99: mod_base = OTHER; note = nucleotide with phosphorothioate linkage
  modified_base 100: mod_base = OTHER; note = 2'-O-methyl modified nucleotide with phosphorothioate linkage
  modified_base 101: mod_base = OTHER; note = 2'-O-methyl modified nucleotide

SEQ ID NO: 2118 - RNA, 101 nt, synthetic construct; identical to SEQ ID NO: 1118
  source 1..101: mol_type = other RNA
  modified_base 1: mod_base = OTHER; note = 2'-O-methyl modified nucleotide with phosphorothioate linkage
  modified_base 2: mod_base = OTHER; note = 2'-O-methyl modified nucleotide with phosphorothioate linkage
  modified_base 3: mod_base = OTHER; note = 2'-O-methyl modified nucleotide with phosphorothioate linkage
  modified_base 4: mod_base = OTHER; note = 2'-O-methyl modified nucleotide
  modified_base 5: mod_base = OTHER; note = 2'-O-methyl modified nucleotide
  modified_base 8: mod_base = OTHER; note = 2'-O-methyl modified nucleotide
  modified_base 9: mod_base = OTHER; note = 2'-O-methyl modified nucleotide
  modified_base 11: mod_base = OTHER; note = 2'-O-methyl modified nucleotide
  modified_base 13: mod_base = OTHER; note = 2'-O-methyl modified nucleotide
  modified_base 18: mod_base = OTHER; note = 2'-O-methyl modified nucleotide
  modified_base 22: mod_base = OTHER; note = 2'-O-methyl modified nucleotide
  modified_base 25: mod_base = OTHER; note = 2'-O-methyl modified nucleotide
  modified_base 29: mod_base = OTHER; note = 2'-O-methyl modified nucleotide
  modified_base 30: mod_base = OTHER; note = 2'-O-methyl modified nucleotide
  modified_base 31: mod_base = OTHER; note = 2'-O-methyl modified nucleotide
  modified_base 32: mod_base = OTHER; note = 2'-O-methyl modified nucleotide
  modified_base 37: mod_base = OTHER; note = 2'-O-methyl modified nucleotide
  modified_base 38: mod_base = OTHER; note = 2'-O-methyl modified nucleotide
  modified_base 39: mod_base = OTHER; note = 2'-O-methyl modified nucleotide
  modified_base 40: mod_base = OTHER; note = 2'-O-methyl modified nucleotide
  modified_base 41: mod_base = OTHER; note = 2'-O-methyl modified nucleotide
  modified_base 42: mod_base = OTHER; note = 2'-O-methyl modified nucleotide
  modified_base 43: mod_base = OTHER; note = 2'-O-methyl modified nucleotide
  modified_base 47: mod_base = OTHER; note = 2'-O-methyl modified nucleotide
  modified_base 48: mod_base = OTHER; note = 2'-O-methyl modified nucleotide
  modified_base 51: mod_base = OTHER; note = 2'-O-methyl modified nucleotide
  modified_base 54: mod_base = OTHER; note = nucleotide with phosphorothioate linkage
  modified_base 58: mod_base = OTHER; note = 2'-O-methyl modified nucleotide
  modified_base 59: mod_base = OTHER; note = 2'-O-methyl modified nucleotide
  modified_base 61: mod_base = OTHER; note = 2'-O-methyl modified nucleotide
  modified_base 62: mod_base = OTHER; note = 2'-O-methyl modified nucleotide
  modified_base 63: mod_base = OTHER; note = 2'-O-methyl modified nucleotide
  modified_base 64: mod_base = OTHER; note = 2'-O-methyl modified nucleotide
  modified_base 65: mod_base = OTHER; note = 2'-O-methyl modified nucleotide
  modified_base 66: mod_base = OTHER; note = 2'-O-methyl modified nucleotide
  modified_base 67: mod_base = OTHER; note = 2'-O-methyl modified nucleotide
  modified_base 68: mod_base = OTHER; note = 2'-O-methyl modified nucleotide
  modified_base 69: mod_base = OTHER; note = 2'-O-methyl modified nucleotide
  modified_base 70: mod_base = OTHER; note = 2'-O-methyl modified nucleotide
  modified_base 75: mod_base = OTHER; note = 2'-O-methyl modified nucleotide
  modified_base 77: mod_base = OTHER; note = 2'-O-methyl modified nucleotide
  modified_base 80: mod_base = OTHER; note = 2'-O-methyl modified nucleotide
  modified_base 86: mod_base = OTHER; note = 2'-O-methyl modified nucleotide
  modified_base 87: mod_base = OTHER; note = 2'-O-methyl modified nucleotide
  modified_base 89: mod_base = OTHER; note = 2'-O-methyl modified nucleotide
  modified_base 90: mod_base = OTHER; note = 2'-O-methyl modified nucleotide
  modified_base 91: mod_base = OTHER; note = 2'-O-methyl modified nucleotide
  modified_base 92: mod_base = OTHER; note = 2'-O-methyl modified nucleotide
  modified_base 99: mod_base = OTHER; note = nucleotide with phosphorothioate linkage
  modified_base 100: mod_base = OTHER; note = 2'-O-methyl modified nucleotide with phosphorothioate linkage
  modified_base 101: mod_base = OTHER; note = 2'-O-methyl modified nucleotide

SEQ ID NO: 2119 - RNA, 101 nt, synthetic construct; identical to SEQ ID NO: 1119
  source 1..101: mol_type = other RNA
  modified_base 1: mod_base = OTHER; note = 2'-O-methyl modified nucleotide with phosphorothioate linkage
  modified_base 2: mod_base = OTHER; note = 2'-O-methyl modified nucleotide with phosphorothioate linkage
  modified_base 3: mod_base = OTHER; note = 2'-O-methyl modified nucleotide with phosphorothioate linkage
  modified_base 4: mod_base = OTHER; note = 2'-O-methyl modified nucleotide
  modified_base 5: mod_base = OTHER; note = 2'-O-methyl modified nucleotide
  modified_base 8: mod_base = OTHER; note = 2'-O-methyl modified nucleotide
  modified_base 9: mod_base = OTHER; note = 2'-O-methyl modified nucleotide
  modified_base 11: mod_base = OTHER; note = 2'-O-methyl modified nucleotide
  modified_base 13: mod_base = OTHER; note = 2'-O-methyl modified nucleotide
  modified_base 18: mod_base = OTHER; note = 2'-O-methyl modified nucleotide
  modified_base 22: mod_base = OTHER; note = 2'-O-methyl modified nucleotide
  modified_base 25: mod_base = OTHER; note = 2'-O-methyl modified nucleotide
  modified_base 29: mod_base = OTHER; note = 2'-O-methyl modified nucleotide
  modified_base 30: mod_base = OTHER; note = 2'-O-methyl modified nucleotide
  modified_base 31: mod_base = OTHER; note = 2'-O-methyl modified nucleotide
  modified_base 32: mod_base = OTHER; note = 2'-O-methyl modified nucleotide
  modified_base 37: mod_base = OTHER; note = 2'-O-methyl modified nucleotide
  modified_base 38: mod_base = OTHER; note = 2'-O-methyl modified nucleotide
  modified_base 39: mod_base = OTHER; note = 2'-O-methyl modified nucleotide
  modified_base 40: mod_base = OTHER; note = 2'-O-methyl modified nucleotide
  modified_base 41: mod_base = OTHER; note = 2'-O-methyl modified nucleotide
  modified_base 42: mod_base = OTHER; note = 2'-O-methyl modified nucleotide
  modified_base 43: mod_base = OTHER; note = 2'-O-methyl modified nucleotide
  modified_base 47: mod_base = OTHER; note = 2'-O-methyl modified nucleotide
  modified_base 48: mod_base = OTHER; note = 2'-O-methyl modified nucleotide
  modified_base 51: mod_base = OTHER; note = 2'-O-methyl modified nucleotide
  modified_base 54: mod_base = OTHER; note = nucleotide with phosphorothioate linkage
  modified_base 58: mod_base = OTHER; note = 2'-O-methyl modified nucleotide
  modified_base 59: mod_base = OTHER; note = 2'-O-methyl modified nucleotide
  modified_base 61: mod_base = OTHER; note = 2'-O-methyl modified nucleotide
  modified_base 62: mod_base = OTHER; note = 2'-O-methyl modified nucleotide
  modified_base 63: mod_base = OTHER; note = 2'-O-methyl modified nucleotide
  modified_base 64: mod_base = OTHER; note = 2'-O-methyl modified nucleotide
  modified_base 65: mod_base = OTHER; note = 2'-O-methyl modified nucleotide
  modified_base 66: mod_base = OTHER; note = 2'-O-methyl modified nucleotide
  modified_base 67: mod_base = OTHER; note = 2'-O-methyl modified nucleotide
  modified_base 68: mod_base = OTHER; note = 2'-O-methyl modified nucleotide
  modified_base 69: mod_base = OTHER; note = 2'-O-methyl modified nucleotide
  modified_base 70: mod_base = OTHER; note = 2'-O-methyl modified nucleotide
  modified_base 75: mod_base = OTHER; note = 2'-O-methyl modified nucleotide
  modified_base 77: mod_base = OTHER; note = 2'-O-methyl modified nucleotide
  modified_base 80: mod_base = OTHER; note = 2'-O-methyl modified nucleotide
  modified_base 86: mod_base = OTHER; note = 2'-O-methyl modified nucleotide
  modified_base 87: mod_base = OTHER; note = 2'-O-methyl modified nucleotide
  modified_base 89: mod_base = OTHER; note = 2'-O-methyl modified nucleotide
  modified_base 90: mod_base = OTHER; note = 2'-O-methyl modified nucleotide
  modified_base 91: mod_base = OTHER; note = 2'-O-methyl modified nucleotide
  modified_base 92: mod_base = OTHER; note = 2'-O-methyl modified nucleotide
  modified_base 99: mod_base = OTHER; note = nucleotide with phosphorothioate linkage
  modified_base 100: mod_base = OTHER; note = 2'-O-methyl modified nucleotide with phosphorothioate linkage
  modified_base 101: mod_base = OTHER; note = 2'-O-methyl modified nucleotide

SEQ ID NO: 2120 - RNA, 101 nt, synthetic construct; identical to SEQ ID NO: 1120
  source 1..101: mol_type = other RNA
  modified_base 1: mod_base = OTHER; note = 2'-O-methyl modified nucleotide with phosphorothioate linkage
  modified_base 2: mod_base = OTHER; note = 2'-O-methyl modified nucleotide with phosphorothioate linkage
  modified_base 3: mod_base = OTHER; note = 2'-O-methyl modified nucleotide with phosphorothioate linkage
  modified_base 4: mod_base = OTHER; note = 2'-O-methyl modified nucleotide
  modified_base 5: mod_base = OTHER; note = 2'-O-methyl modified nucleotide
  modified_base 8: mod_base = OTHER; note = 2'-O-methyl modified nucleotide
  modified_base 9: mod_base = OTHER; note = 2'-O-methyl modified nucleotide
  modified_base 11: mod_base = OTHER; note = 2'-O-methyl modified nucleotide
  modified_base 13: mod_base = OTHER; note = 2'-O-methyl modified nucleotide
  modified_base 18: mod_base = OTHER; note = 2'-O-methyl modified nucleotide
  modified_base 22: mod_base = OTHER; note = 2'-O-methyl modified nucleotide
  modified_base 25: mod_base = OTHER; note = 2'-O-methyl modified nucleotide
  modified_base 29: mod_base = OTHER; note = 2'-O-methyl modified nucleotide
  modified_base 30: mod_base = OTHER; note = 2'-O-methyl modified nucleotide
  modified_base 31: mod_base = OTHER; note = 2'-O-methyl modified nucleotide
  modified_base 32: mod_base = OTHER; note = 2'-O-methyl modified nucleotide
  modified_base 37: mod_base = OTHER; note = 2'-O-methyl modified nucleotide
  modified_base 38: mod_base = OTHER; note = 2'-O-methyl modified nucleotide
  modified_base 39: mod_base = OTHER; note = 2'-O-methyl modified nucleotide
  modified_base 40: mod_base = OTHER; note = 2'-O-methyl modified nucleotide
  modified_base 41: mod_base = OTHER; note = 2'-O-methyl modified nucleotide
  modified_base 42: mod_base = OTHER; note = 2'-O-methyl modified nucleotide
  modified_base 43: mod_base = OTHER; note = 2'-O-methyl modified nucleotide
  modified_base 47: mod_base = OTHER; note = 2'-O-methyl modified nucleotide
  modified_base 48: mod_base = OTHER; note = 2'-O-methyl modified nucleotide
  modified_base 51: mod_base = OTHER; note = 2'-O-methyl modified nucleotide
  modified_base 54: mod_base = OTHER; note = nucleotide with phosphorothioate linkage
  modified_base 58: mod_base = OTHER; note = 2'-O-methyl modified nucleotide
  modified_base 59: mod_base = OTHER; note = 2'-O-methyl modified nucleotide
  modified_base 61: mod_base = OTHER; note = 2'-O-methyl modified nucleotide
  modified_base 62: mod_base = OTHER; note = 2'-O-methyl modified nucleotide
  modified_base 63: mod_base = OTHER; note = 2'-O-methyl modified nucleotide
  modified_base 64: mod_base = OTHER; note = 2'-O-methyl modified nucleotide
  modified_base 65: mod_base = OTHER; note = 2'-O-methyl modified nucleotide
  modified_base 66: mod_base = OTHER; note = 2'-O-methyl modified nucleotide
  modified_base 67: mod_base = OTHER; note = 2'-O-methyl modified nucleotide
  modified_base 68: mod_base = OTHER; note = 2'-O-methyl modified nucleotide
  modified_base 69: mod_base = OTHER; note = 2'-O-methyl modified nucleotide
  modified_base 70: mod_base = OTHER; note = 2'-O-methyl modified nucleotide
  modified_base 75: mod_base = OTHER; note = 2'-O-methyl modified nucleotide
  modified_base 77: mod_base = OTHER; note = 2'-O-methyl modified nucleotide
  modified_base 80: mod_base = OTHER; note = 2'-O-methyl modified nucleotide
  modified_base 86: mod_base = OTHER; note = 2'-O-methyl modified nucleotide
  modified_base 87: mod_base = OTHER; note = 2'-O-methyl modified nucleotide
  modified_base 89: mod_base = OTHER; note = 2'-O-methyl modified nucleotide
  modified_base 90: mod_base = OTHER; note = 2'-O-methyl modified nucleotide
  modified_base 91: mod_base = OTHER; note = 2'-O-methyl modified nucleotide
  modified_base 92: mod_base = OTHER; note = 2'-O-methyl modified nucleotide
  modified_base 99: mod_base = OTHER; note = nucleotide with phosphorothioate linkage
  modified_base 100: mod_base = OTHER; note = 2'-O-methyl modified nucleotide with phosphorothioate linkage
  modified_base 101: mod_base = OTHER; note = 2'-O-methyl modified nucleotide

SEQ ID NO: 2121 - RNA, 101 nt, synthetic construct; identical to SEQ ID NO: 1121
  source 1..101: mol_type = other RNA
  modified_base 1: mod_base = OTHER; note = 2'-O-methyl modified nucleotide with phosphorothioate linkage
  modified_base 2: mod_base = OTHER; note = 2'-O-methyl modified nucleotide with phosphorothioate linkage
  modified_base 3: mod_base = OTHER; note = 2'-O-methyl modified nucleotide with phosphorothioate linkage
  modified_base 4: mod_base = OTHER; note = 2'-O-methyl modified nucleotide
  modified_base 5: mod_base = OTHER; note = 2'-O-methyl modified nucleotide
  modified_base 8: mod_base = OTHER; note = 2'-O-methyl modified nucleotide
  modified_base 9: mod_base = OTHER; note = 2'-O-methyl modified nucleotide
  modified_base 11: mod_base = OTHER; note = 2'-O-methyl modified nucleotide
  modified_base 13: mod_base = OTHER; note = 2'-O-methyl modified nucleotide
  modified_base 18: mod_base = OTHER; note = 2'-O-methyl modified nucleotide
  modified_base 22: mod_base = OTHER; note = 2'-O-methyl modified nucleotide
  modified_base 25: mod_base = OTHER; note = 2'-O-methyl modified nucleotide
  modified_base 29: mod_base = OTHER; note = 2'-O-methyl modified nucleotide
  modified_base 30: mod_base = OTHER; note = 2'-O-methyl modified nucleotide
  modified_base 31: mod_base = OTHER; note = 2'-O-methyl modified nucleotide
  modified_base 32: mod_base = OTHER; note = 2'-O-methyl modified nucleotide
  modified_base 37: mod_base = OTHER; note = 2'-O-methyl modified nucleotide
  modified_base 38: mod_base = OTHER; note = 2'-O-methyl modified nucleotide
  modified_base 39: mod_base = OTHER; note = 2'-O-methyl modified nucleotide
  modified_base 40: mod_base = OTHER; note = 2'-O-methyl modified nucleotide
  modified_base 41: mod_base = OTHER; note = 2'-O-methyl modified nucleotide
  modified_base 42: mod_base = OTHER; note = 2'-O-methyl modified nucleotide
  modified_base 43: mod_base = OTHER; note = 2'-O-methyl modified nucleotide
  modified_base 47: mod_base = OTHER; note = 2'-O-methyl modified nucleotide
  modified_base 48: mod_base = OTHER; note = 2'-O-methyl modified nucleotide
  modified_base 51: mod_base = OTHER; note = 2'-O-methyl modified nucleotide
  modified_base 54: mod_base = OTHER; note = nucleotide with phosphorothioate linkage
  modified_base 58: mod_base = OTHER; note = 2'-O-methyl modified nucleotide
  modified_base 59: mod_base = OTHER; note = 2'-O-methyl modified nucleotide
  modified_base 61: mod_base = OTHER; note = 2'-O-methyl modified nucleotide
  modified_base 62: mod_base = OTHER; note = 2'-O-methyl modified nucleotide
  modified_base 63: mod_base = OTHER; note = 2'-O-methyl modified nucleotide
  modified_base 64: mod_base = OTHER; note = 2'-O-methyl modified nucleotide
  modified_base 65: mod_base = OTHER; note = 2'-O-methyl modified nucleotide
  modified_base 66: mod_base = OTHER; note = 2'-O-methyl modified nucleotide
  modified_base 67: mod_base = OTHER; note = 2'-O-methyl modified nucleotide
  modified_base 68: mod_base = OTHER; note = 2'-O-methyl modified nucleotide
  modified_base 69: mod_base = OTHER; note = 2'-O-methyl modified nucleotide
  modified_base 70: mod_base = OTHER; note = 2'-O-methyl modified nucleotide
  modified_base 75: mod_base = OTHER; note = 2'-O-methyl modified nucleotide
  modified_base 77: mod_base = OTHER; note = 2'-O-methyl modified nucleotide
  modified_base 80: mod_base = OTHER; note = 2'-O-methyl modified nucleotide
  modified_base 86: mod_base = OTHER; note = 2'-O-methyl modified nucleotide
  modified_base 87: mod_base = OTHER; note = 2'-O-methyl modified nucleotide
  modified_base 89: mod_base = OTHER; note = 2'-O-methyl modified nucleotide
  modified_base 90: mod_base = OTHER; note = 2'-O-methyl modified nucleotide
  modified_base 91: mod_base = OTHER; note = 2'-O-methyl modified nucleotide
  modified_base 92: mod_base = OTHER; note = 2'-O-methyl modified nucleotide
  modified_base 99: mod_base = OTHER; note = nucleotide with phosphorothioate linkage
  modified_base 100: mod_base = OTHER; note = 2'-O-methyl modified nucleotide with phosphorothioate linkage
  modified_base 101: mod_base = OTHER; note = 2'-O-methyl modified nucleotide

SEQ ID NO: 2122 - RNA, 101 nt, synthetic construct; identical to SEQ ID NO: 1122
  source 1..101: mol_type = other RNA
  modified_base 1: mod_base = OTHER; note = 2'-O-methyl modified nucleotide with phosphorothioate linkage
  modified_base 2: mod_base = OTHER; note = 2'-O-methyl modified nucleotide with phosphorothioate linkage
  modified_base 3: mod_base = OTHER; note = 2'-O-methyl modified nucleotide with phosphorothioate linkage
  modified_base 4: mod_base = OTHER; note = 2'-O-methyl modified nucleotide
  modified_base 5: mod_base = OTHER; note = 2'-O-methyl modified nucleotide
  modified_base 8: mod_base = OTHER; note = 2'-O-methyl modified nucleotide
  modified_base 9: mod_base = OTHER; note = 2'-O-methyl modified nucleotide
  modified_base 11: mod_base = OTHER; note = 2'-O-methyl modified nucleotide
  modified_base 13: mod_base = OTHER; note = 2'-O-methyl modified nucleotide
  modified_base 18: mod_base = OTHER; note = 2'-O-methyl modified nucleotide
  modified_base 22: mod_base = OTHER; note = 2'-O-methyl modified nucleotide
  modified_base 25: mod_base = OTHER; note = 2'-O-methyl modified nucleotide
  modified_base 29: mod_base = OTHER; note = 2'-O-methyl modified nucleotide
  modified_base 30: mod_base = OTHER; note = 2'-O-methyl modified nucleotide
  modified_base 31: mod_base = OTHER; note = 2'-O-methyl modified nucleotide
  modified_base 32: mod_base = OTHER; note = 2'-O-methyl modified nucleotide
  modified_base 37: mod_base = OTHER; note = 2'-O-methyl modified nucleotide
  modified_base 38: mod_base = OTHER; note = 2'-O-methyl modified nucleotide
  modified_base 39: mod_base = OTHER; note = 2'-O-methyl modified nucleotide
  modified_base 40: mod_base = OTHER; note = 2'-O-methyl modified nucleotide
  modified_base 41: mod_base = OTHER; note = 2'-O-methyl modified nucleotide
  modified_base 42: mod_base = OTHER; note = 2'-O-methyl modified nucleotide
  modified_base 43: mod_base = OTHER; note = 2'-O-methyl modified nucleotide
  modified_base 47: mod_base = OTHER; note = 2'-O-methyl modified nucleotide
  modified_base 48: mod_base = OTHER; note = 2'-O-methyl modified nucleotide
  modified_base 51: mod_base = OTHER; note = 2'-O-methyl modified nucleotide
  modified_base 54: mod_base = OTHER; note = nucleotide with phosphorothioate linkage
  modified_base 58: mod_base = OTHER; note = 2'-O-methyl modified nucleotide
  modified_base 59: mod_base = OTHER; note = 2'-O-methyl modified nucleotide
  modified_base 61: mod_base = OTHER; note = 2'-O-methyl modified nucleotide
  modified_base 62: mod_base = OTHER; note = 2'-O-methyl modified nucleotide
  modified_base 63: mod_base = OTHER; note = 2'-O-methyl modified nucleotide
  modified_base 64: mod_base = OTHER; note = 2'-O-methyl modified nucleotide
  modified_base 65: mod_base = OTHER; note = 2'-O-methyl modified nucleotide
  modified_base 66: mod_base = OTHER; note = 2'-O-methyl modified nucleotide
  modified_base 67: mod_base = OTHER; note = 2'-O-methyl modified nucleotide
  modified_base 68: mod_base = OTHER; note = 2'-O-methyl modified nucleotide
  modified_base 69: mod_base = OTHER; note = 2'-O-methyl modified nucleotide
  modified_base 70: mod_base = OTHER; note = 2'-O-methyl modified nucleotide
  modified_base 75: mod_base = OTHER; note = 2'-O-methyl modified nucleotide
  modified_base 77: mod_base = OTHER; note = 2'-O-methyl modified nucleotide
  modified_base 80: mod_base = OTHER; note = 2'-O-methyl modified nucleotide
  modified_base 86: mod_base = OTHER; note = 2'-O-methyl modified nucleotide
  modified_base 87: mod_base = OTHER; note = 2'-O-methyl modified nucleotide
  modified_base 89: mod_base = OTHER; note = 2'-O-methyl modified nucleotide
  modified_base 90: mod_base = OTHER; note = 2'-O-methyl modified nucleotide
  modified_base 91: mod_base = OTHER; note = 2'-O-methyl modified nucleotide
  modified_base 92: mod_base = OTHER; note = 2'-O-methyl modified nucleotide
  modified_base 99: mod_base = OTHER; note = nucleotide with phosphorothioate linkage
  modified_base 100: mod_base = OTHER; note = 2'-O-methyl modified nucleotide with phosphorothioate linkage
  modified_base 101: mod_base = OTHER; note = 2'-O-methyl modified nucleotide

SEQ ID NO: 2123 - RNA, 101 nt, synthetic construct; identical to SEQ ID NO: 1123
  source 1..101: mol_type = other RNA
  modified_base 1: mod_base = OTHER; note = 2'-O-methyl modified nucleotide with phosphorothioate linkage
  modified_base 2: mod_base = OTHER; note = 2'-O-methyl modified nucleotide with phosphorothioate linkage
  modified_base 3: mod_base = OTHER; note = 2'-O-methyl modified nucleotide with phosphorothioate linkage
  modified_base 4: mod_base = OTHER; note = 2'-O-methyl modified nucleotide
  modified_base 5: mod_base = OTHER; note = 2'-O-methyl modified nucleotide
  modified_base 8: mod_base = OTHER; note = 2'-O-methyl modified nucleotide
  modified_base 9: mod_base = OTHER; note = 2'-O-methyl modified nucleotide
  modified_base 11: mod_base = OTHER; note = 2'-O-methyl modified nucleotide
  modified_base 13: mod_base = OTHER; note = 2'-O-methyl modified nucleotide
  modified_base 18: mod_base = OTHER; note = 2'-O-methyl modified nucleotide
  modified_base 22: mod_base = OTHER; note = 2'-O-methyl modified nucleotide
  modified_base 25: mod_base = OTHER; note = 2'-O-methyl modified nucleotide
  modified_base 29: mod_base = OTHER; note = 2'-O-methyl modified nucleotide
  modified_base 30: mod_base = OTHER; note = 2'-O-methyl modified nucleotide
  modified_base 31: mod_base = OTHER; note = 2'-O-methyl modified nucleotide
  modified_base 32: mod_base = OTHER; note = 2'-O-methyl modified nucleotide
  modified_base 37: mod_base = OTHER; note = 2'-O-methyl modified nucleotide
  modified_base 38: mod_base = OTHER; note = 2'-O-methyl modified nucleotide
  modified_base 39: mod_base = OTHER; note = 2'-O-methyl modified nucleotide
  modified_base 40: mod_base = OTHER; note = 2'-O-methyl modified nucleotide
  modified_base 41: mod_base = OTHER; note = 2'-O-methyl modified nucleotide
  modified_base 42: mod_base = OTHER; note = 2'-O-methyl modified nucleotide
  modified_base 43: mod_base = OTHER; note = 2'-O-methyl modified nucleotide
  modified_base 47: mod_base = OTHER; note = 2'-O-methyl modified nucleotide
  modified_base 48: mod_base = OTHER; note = 2'-O-methyl modified nucleotide
  modified_base 51: mod_base = OTHER; note = 2'-O-methyl modified nucleotide
  modified_base 54: mod_base = OTHER; note = nucleotide with phosphorothioate linkage
  modified_base 58: mod_base = OTHER; note = 2'-O-methyl modified nucleotide
  modified_base 59: mod_base = OTHER; note = 2'-O-methyl modified nucleotide
  modified_base 61: mod_base = OTHER; note = 2'-O-methyl modified nucleotide
  modified_base 62: mod_base = OTHER; note = 2'-O-methyl modified nucleotide
  modified_base 63: mod_base = OTHER; note = 2'-O-methyl modified nucleotide
  modified_base 64: mod_base = OTHER; note = 2'-O-methyl modified nucleotide
  modified_base 65: mod_base = OTHER; note = 2'-O-methyl modified nucleotide
  modified_base 66: mod_base = OTHER; note = 2'-O-methyl modified nucleotide
  modified_base 67: mod_base = OTHER; note = 2'-O-methyl modified nucleotide
  modified_base 68: mod_base = OTHER; note = 2'-O-methyl modified nucleotide
  modified_base 69: mod_base = OTHER; note = 2'-O-methyl modified nucleotide
  modified_base 70: mod_base = OTHER; note = 2'-O-methyl modified nucleotide
  modified_base 75: mod_base = OTHER; note = 2'-O-methyl modified nucleotide
  modified_base 77: mod_base = OTHER; note = 2'-O-methyl modified nucleotide
  modified_base 80: mod_base = OTHER; note = 2'-O-methyl modified nucleotide
  modified_base 86: mod_base = OTHER; note = 2'-O-methyl modified nucleotide
  modified_base 87: mod_base = OTHER; note = 2'-O-methyl modified nucleotide
  modified_base 89: mod_base = OTHER; note = 2'-O-methyl modified nucleotide
  modified_base 90: mod_base = OTHER; note = 2'-O-methyl modified nucleotide
  modified_base 91: mod_base = OTHER; note = 2'-O-methyl modified nucleotide
  modified_base 92: mod_base = OTHER; note = 2'-O-methyl modified nucleotide
  modified_base 99: mod_base = OTHER; note = nucleotide with phosphorothioate linkage
  modified_base 100: mod_base = OTHER; note = 2'-O-methyl modified nucleotide with phosphorothioate linkage
  modified_base 101: mod_base = OTHER; note = 2'-O-methyl modified nucleotide

SEQ ID NO: 2124 - RNA, 101 nt, synthetic construct; identical to SEQ ID NO: 1124
  source 1..101: mol_type = other RNA
  modified_base 1: mod_base = OTHER; note = 2'-O-methyl modified nucleotide with phosphorothioate linkage
  modified_base 2: mod_base = OTHER; note = 2'-O-methyl modified nucleotide with phosphorothioate linkage
  modified_base 3: mod_base = OTHER; note = 2'-O-methyl modified nucleotide with phosphorothioate linkage
  modified_base 4: mod_base = OTHER; note = 2'-O-methyl modified nucleotide
  modified_base 5: mod_base = OTHER; note = 2'-O-methyl modified nucleotide
  modified_base 8: mod_base = OTHER; note = 2'-O-methyl modified nucleotide
  modified_base 9: mod_base = OTHER; note = 2'-O-methyl modified nucleotide
  modified_base 11: mod_base = OTHER; note = 2'-O-methyl modified nucleotide
  modified_base 13: mod_base = OTHER; note = 2'-O-methyl modified nucleotide
  modified_base 18: mod_base = OTHER; note = 2'-O-methyl modified nucleotide
  modified_base 22: mod_base = OTHER; note = 2'-O-methyl modified nucleotide
  modified_base 25: mod_base = OTHER; note = 2'-O-methyl modified nucleotide
  modified_base 29: mod_base = OTHER; note = 2'-O-methyl modified nucleotide
  modified_base 30: mod_base = OTHER; note = 2'-O-methyl modified nucleotide
  modified_base 31: mod_base = OTHER; note = 2'-O-methyl modified nucleotide
  modified_base 32: mod_base = OTHER; note = 2'-O-methyl modified nucleotide
  modified_base 37: mod_base = OTHER; note = 2'-O-methyl modified nucleotide
  modified_base 38: mod_base = OTHER; note = 2'-O-methyl modified nucleotide
  modified_base 39: mod_base = OTHER; note = 2'-O-methyl modified nucleotide
  modified_base 40: mod_base = OTHER; note = 2'-O-methyl modified nucleotide
  modified_base 41: mod_base = OTHER; note = 2'-O-methyl modified nucleotide
  modified_base 42: mod_base = OTHER; note = 2'-O-methyl modified nucleotide
  modified_base 43: mod_base = OTHER; note = 2'-O-methyl modified nucleotide
  modified_base 47: mod_base = OTHER; note = 2'-O-methyl modified nucleotide
  modified_base 48: mod_base = OTHER; note = 2'-O-methyl modified nucleotide
  modified_base 51: mod_base = OTHER; note = 2'-O-methyl modified nucleotide
  modified_base 54: mod_base = OTHER; note = nucleotide with phosphorothioate linkage
  modified_base 58: mod_base = OTHER; note = 2'-O-methyl modified nucleotide
  modified_base 59: mod_base = OTHER; note = 2'-O-methyl modified nucleotide
  modified_base 61: mod_base = OTHER; note = 2'-O-methyl modified nucleotide
  modified_base 62: mod_base = OTHER; note = 2'-O-methyl modified nucleotide
  modified_base 63: mod_base = OTHER; note = 2'-O-methyl modified nucleotide
  modified_base 64: mod_base = OTHER; note = 2'-O-methyl modified nucleotide
  modified_base 65: mod_base = OTHER; note = 2'-O-methyl modified nucleotide
  modified_base 66: mod_base = OTHER; note = 2'-O-methyl modified nucleotide
  modified_base 67: mod_base = OTHER; note = 2'-O-methyl modified nucleotide
  modified_base 68: mod_base = OTHER; note = 2'-O-methyl modified nucleotide
  modified_base 69: mod_base = OTHER; note = 2'-O-methyl modified nucleotide
  modified_base 70: mod_base = OTHER; note = 2'-O-methyl modified nucleotide
  modified_base 75: mod_base = OTHER; note = 2'-O-methyl modified nucleotide
  modified_base 77: mod_base = OTHER; note = 2'-O-methyl modified nucleotide
  modified_base 80: mod_base = OTHER; note = 2'-O-methyl modified nucleotide
  modified_base 86: mod_base = OTHER; note = 2'-O-methyl modified nucleotide
  modified_base 87: mod_base = OTHER; note = 2'-O-methyl modified nucleotide
  modified_base 89: mod_base = OTHER; note = 2'-O-methyl modified nucleotide
  modified_base 90: mod_base = OTHER; note = 2'-O-methyl modified nucleotide
  modified_base 91: mod_base = OTHER; note = 2'-O-methyl modified nucleotide
  modified_base 92: mod_base = OTHER; note = 2'-O-methyl modified nucleotide
  modified_base 99: mod_base = OTHER; note = nucleotide with phosphorothioate linkage
  modified_base 100: mod_base = OTHER; note = 2'-O-methyl modified nucleotide with phosphorothioate linkage
  modified_base 101: mod_base = OTHER; note = 2'-O-methyl modified nucleotide

SEQ ID NO: 2125 - RNA, 101 nt, synthetic construct; identical to SEQ ID NO: 1125
  source 1..101: mol_type = other RNA
  modified_base 1: mod_base = OTHER; note = 2'-O-methyl modified nucleotide with phosphorothioate linkage
  modified_base 2: mod_base = OTHER; note = 2'-O-methyl modified nucleotide with phosphorothioate linkage
  modified_base 3: mod_base = OTHER; note = 2'-O-methyl modified nucleotide with phosphorothioate linkage
  modified_base 4: mod_base = OTHER; note = 2'-O-methyl modified nucleotide
  modified_base 5: mod_base = OTHER; note = 2'-O-methyl modified nucleotide
  modified_base 8: mod_base = OTHER; note = 2'-O-methyl modified nucleotide
  modified_base 9: mod_base = OTHER; note = 2'-O-methyl modified nucleotide
  modified_base 11: mod_base = OTHER; note = 2'-O-methyl modified nucleotide
  modified_base 13: mod_base = OTHER; note = 2'-O-methyl modified nucleotide
  modified_base 18: mod_base = OTHER; note = 2'-O-methyl modified nucleotide
  modified_base 22: mod_base = OTHER; note = 2'-O-methyl modified nucleotide
  modified_base 25: mod_base = OTHER; note = 2'-O-methyl modified nucleotide
  modified_base 29: mod_base = OTHER; note = 2'-O-methyl modified nucleotide
  modified_base 30: mod_base = OTHER; note = 2'-O-methyl modified nucleotide
  modified_base 31: mod_base = OTHER; note = 2'-O-methyl modified nucleotide
  modified_base 32: mod_base = OTHER; note = 2'-O-methyl modified nucleotide
  modified_base 37: mod_base = OTHER; note = 2'-O-methyl modified nucleotide
  modified_base 38: mod_base = OTHER; note = 2'-O-methyl modified nucleotide
  modified_base 39: mod_base = OTHER; note = 2'-O-methyl modified nucleotide
  modified_base 40: mod_base = OTHER; note = 2'-O-methyl modified nucleotide
  modified_base 41: mod_base = OTHER; note = 2'-O-methyl modified nucleotide
  modified_base 42: mod_base = OTHER; note = 2'-O-methyl modified nucleotide
  modified_base 43: mod_base = OTHER; note = 2'-O-methyl modified nucleotide
  modified_base 47: mod_base = OTHER; note = 2'-O-methyl modified nucleotide
  modified_base 48: mod_base = OTHER; note = 2'-O-methyl modified nucleotide
  modified_base 51: mod_base = OTHER; note = 2'-O-methyl modified nucleotide
  modified_base 54: mod_base = OTHER; note = nucleotide with phosphorothioate linkage
  modified_base 58: mod_base = OTHER; note = 2'-O-methyl modified nucleotide
  modified_base 59: mod_base = OTHER; note = 2'-O-methyl modified nucleotide
  modified_base 61: mod_base = OTHER; note = 2'-O-methyl modified nucleotide
  modified_base 62: mod_base = OTHER; note = 2'-O-methyl modified nucleotide
  modified_base 63: mod_base = OTHER; note = 2'-O-methyl modified nucleotide
  modified_base 64: mod_base = OTHER; note = 2'-O-methyl modified nucleotide
  modified_base 65: mod_base = OTHER; note = 2'-O-methyl modified nucleotide
  modified_base 66: mod_base = OTHER; note = 2'-O-methyl modified nucleotide
  modified_base 67: mod_base = OTHER; note = 2'-O-methyl modified nucleotide
  modified_base 68: mod_base = OTHER; note = 2'-O-methyl modified nucleotide
  modified_base 69: mod_base = OTHER; note = 2'-O-methyl modified nucleotide
  modified_base 70: mod_base = OTHER; note = 2'-O-methyl modified nucleotide
  modified_base 75: mod_base = OTHER; note = 2'-O-methyl modified nucleotide
  modified_base 77: mod_base = OTHER; note = 2'-O-methyl modified nucleotide
  modified_base 80: mod_base = OTHER; note = 2'-O-methyl modified nucleotide
  modified_base 86: mod_base = OTHER; note = 2'-O-methyl modified nucleotide
  modified_base 87: mod_base = OTHER; note = 2'-O-methyl modified nucleotide
  modified_base 89: mod_base = OTHER; note = 2'-O-methyl modified nucleotide
  modified_base 90: mod_base = OTHER; note = 2'-O-methyl modified nucleotide
  modified_base 91: mod_base = OTHER; note = 2'-O-methyl modified nucleotide
  modified_base 92: mod_base = OTHER; note = 2'-O-methyl modified nucleotide
  modified_base 99: mod_base = OTHER; note = nucleotide with phosphorothioate linkage
  modified_base 100: mod_base = OTHER; note = 2'-O-methyl modified nucleotide with phosphorothioate linkage
  modified_base 101: mod_base = OTHER; note = 2'-O-methyl modified nucleotide

SEQ ID NO: 2126 - RNA, 101 nt, synthetic construct; identical to SEQ ID NO: 1126
  source 1..101: mol_type = other RNA
  modified_base 1: mod_base = OTHER; note = 2'-O-methyl modified nucleotide with phosphorothioate linkage
  modified_base 2: mod_base = OTHER; note = 2'-O-methyl modified nucleotide with phosphorothioate linkage
  modified_base 3: mod_base = OTHER; note = 2'-O-methyl modified nucleotide with phosphorothioate linkage
  modified_base 4: mod_base = OTHER; note = 2'-O-methyl modified nucleotide
  modified_base 5: mod_base = OTHER; note = 2'-O-methyl modified nucleotide
  modified_base 8: mod_base = OTHER; note = 2'-O-methyl modified nucleotide
  modified_base 9: mod_base = OTHER; note = 2'-O-methyl modified nucleotide
  modified_base 11: mod_base = OTHER; note = 2'-O-methyl modified nucleotide
  modified_base 13: mod_base = OTHER; note = 2'-O-methyl modified nucleotide
  modified_base 18: mod_base = OTHER; note = 2'-O-methyl modified nucleotide
  modified_base 22: mod_base = OTHER; note = 2'-O-methyl modified nucleotide
  modified_base 25: mod_base = OTHER; note = 2'-O-methyl modified nucleotide
  modified_base 29: mod_base = OTHER; note = 2'-O-methyl modified nucleotide
  modified_base 30: mod_base = OTHER; note = 2'-O-methyl modified nucleotide
  modified_base 31: mod_base = OTHER; note = 2'-O-methyl modified nucleotide
  modified_base 32: mod_base = OTHER; note = 2'-O-methyl modified nucleotide
  modified_base 37: mod_base = OTHER; note = 2'-O-methyl modified nucleotide
  modified_base 38: mod_base = OTHER; note = 2'-O-methyl modified nucleotide
  modified_base 39: mod_base = OTHER; note = 2'-O-methyl modified nucleotide
  modified_base 40: mod_base = OTHER; note = 2'-O-methyl modified nucleotide
  modified_base 41: mod_base = OTHER; note = 2'-O-methyl modified nucleotide
  modified_base 42: mod_base = OTHER; note = 2'-O-methyl modified nucleotide
  modified_base 43: mod_base = OTHER; note = 2'-O-methyl modified nucleotide
  modified_base 47: mod_base = OTHER; note = 2'-O-methyl modified nucleotide
  modified_base 48: mod_base = OTHER; note = 2'-O-methyl modified nucleotide
  modified_base 51: mod_base = OTHER; note = 2'-O-methyl modified nucleotide
  modified_base 54: mod_base = OTHER; note = nucleotide with phosphorothioate linkage
  modified_base 58: mod_base = OTHER; note = 2'-O-methyl modified nucleotide
  modified_base 59: mod_base = OTHER; note = 2'-O-methyl modified nucleotide
  modified_base 61: mod_base = OTHER; note = 2'-O-methyl modified nucleotide
  modified_base 62: mod_base = OTHER; note = 2'-O-methyl modified nucleotide
  modified_base 63: mod_base = OTHER; note = 2'-O-methyl modified nucleotide
  modified_base 64: mod_base = OTHER; note = 2'-O-methyl modified nucleotide
  modified_base 65: mod_base = OTHER; note = 2'-O-methyl modified nucleotide
  modified_base 66: mod_base = OTHER; note = 2'-O-methyl modified nucleotide
  modified_base 67: mod_base = OTHER; note = 2'-O-methyl modified nucleotide
  modified_base 68: mod_base = OTHER; note = 2'-O-methyl modified nucleotide
  modified_base 69: mod_base = OTHER; note = 2'-O-methyl modified nucleotide
  modified_base 70: mod_base = OTHER; note = 2'-O-methyl modified nucleotide
  modified_base 75: mod_base = OTHER; note = 2'-O-methyl modified nucleotide
  modified_base 77: mod_base = OTHER; note = 2'-O-methyl modified nucleotide
  modified_base 80: mod_base = OTHER; note = 2'-O-methyl modified nucleotide
  modified_base 86: mod_base = OTHER; note = 2'-O-methyl modified nucleotide
  modified_base 87: mod_base = OTHER; note = 2'-O-methyl modified nucleotide
  modified_base 89: mod_base = OTHER; note = 2'-O-methyl modified nucleotide
  modified_base 90: mod_base = OTHER; note = 2'-O-methyl modified nucleotide
  modified_base 91: mod_base = OTHER; note = 2'-O-methyl modified nucleotide
  modified_base 92: mod_base = OTHER; note = 2'-O-methyl modified nucleotide
  modified_base 99: mod_base = OTHER; note = nucleotide with phosphorothioate linkage
  modified_base 100: mod_base = OTHER; note = 2'-O-methyl modified nucleotide with phosphorothioate linkage
  modified_base 101: mod_base = OTHER; note = 2'-O-methyl modified nucleotide

SEQ ID NO: 2127 - RNA, 101 nt, synthetic construct; identical to SEQ ID NO: 1127
  source 1..101: mol_type = other RNA
  modified_base 1: mod_base = OTHER; note = 2'-O-methyl modified nucleotide with phosphorothioate linkage
  modified_base 2: mod_base = OTHER; note = 2'-O-methyl modified nucleotide with phosphorothioate linkage
  modified_base 3: mod_base = OTHER; note = 2'-O-methyl modified nucleotide with phosphorothioate linkage
  modified_base 4: mod_base = OTHER; note = 2'-O-methyl modified nucleotide
  modified_base 5: mod_base = OTHER; note = 2'-O-methyl modified nucleotide
  modified_base 8: mod_base = OTHER; note = 2'-O-methyl modified nucleotide
  modified_base 9: mod_base = OTHER; note = 2'-O-methyl modified nucleotide
  modified_base 11: mod_base = OTHER; note = 2'-O-methyl modified nucleotide
  modified_base 13: mod_base = OTHER; note = 2'-O-methyl modified nucleotide
  modified_base 18: mod_base = OTHER; note = 2'-O-methyl modified nucleotide
  modified_base 22: mod_base = OTHER; note = 2'-O-methyl modified nucleotide
  modified_base 25: mod_base = OTHER; note = 2'-O-methyl modified nucleotide
  modified_base 29: mod_base = OTHER; note = 2'-O-methyl modified nucleotide
  modified_base 30: mod_base = OTHER; note = 2'-O-methyl modified nucleotide
  modified_base 31: mod_base = OTHER; note = 2'-O-methyl modified nucleotide
  modified_base 32: mod_base = OTHER; note = 2'-O-methyl modified nucleotide
  modified_base 37: mod_base = OTHER; note = 2'-O-methyl modified nucleotide
  modified_base 38: mod_base = OTHER; note = 2'-O-methyl modified nucleotide
  modified_base 39: mod_base = OTHER; note = 2'-O-methyl modified nucleotide
  modified_base 40: mod_base = OTHER; note = 2'-O-methyl modified nucleotide
  modified_base 41: mod_base = OTHER; note = 2'-O-methyl modified nucleotide
  modified_base 42: mod_base = OTHER; note = 2'-O-methyl modified nucleotide
  modified_base 43: mod_base = OTHER; note = 2'-O-methyl modified nucleotide
  modified_base 47: mod_base = OTHER; note = 2'-O-methyl modified nucleotide
  modified_base 48: mod_base = OTHER; note = 2'-O-methyl modified nucleotide
  modified_base 51: mod_base = OTHER; note = 2'-O-methyl modified nucleotide
  modified_base 54: mod_base = OTHER; note = nucleotide with phosphorothioate linkage
  modified_base 58: mod_base = OTHER; note = 2'-O-methyl modified nucleotide
  modified_base 59: mod_base = OTHER; note = 2'-O-methyl modified nucleotide
  modified_base 61: mod_base = OTHER; note = 2'-O-methyl modified nucleotide
  modified_base 62: mod_base = OTHER; note = 2'-O-methyl modified nucleotide
  modified_base 63: mod_base = OTHER; note = 2'-O-methyl modified nucleotide
  modified_base 64: mod_base = OTHER; note = 2'-O-methyl modified nucleotide
  modified_base 65: mod_base = OTHER; note = 2'-O-methyl modified nucleotide
  modified_base 66: mod_base = OTHER; note = 2'-O-methyl modified nucleotide
  modified_base 67: mod_base = OTHER; note = 2'-O-methyl modified nucleotide
  modified_base 68: mod_base = OTHER; note = 2'-O-methyl modified nucleotide
  modified_base 69: mod_base = OTHER; note = 2'-O-methyl modified nucleotide
  modified_base 70: mod_base = OTHER; note = 2'-O-methyl modified nucleotide
  modified_base 75: mod_base = OTHER; note = 2'-O-methyl modified nucleotide
  modified_base 77: mod_base = OTHER; note = 2'-O-methyl modified nucleotide
  modified_base 80: mod_base = OTHER; note = 2'-O-methyl modified nucleotide
  modified_base 86: mod_base = OTHER; note = 2'-O-methyl modified nucleotide
  modified_base 87: mod_base = OTHER; note = 2'-O-methyl modified nucleotide
  modified_base 89: mod_base = OTHER; note = 2'-O-methyl modified nucleotide
  modified_base 90: mod_base = OTHER; note = 2'-O-methyl modified nucleotide
  modified_base 91: mod_base = OTHER; note = 2'-O-methyl modified nucleotide
  modified_base 92: mod_base = OTHER; note = 2'-O-methyl modified nucleotide
  modified_base 99: mod_base = OTHER; note = nucleotide with phosphorothioate linkage
  modified_base 100: mod_base = OTHER; note = 2'-O-methyl modified nucleotide with phosphorothioate linkage
  modified_base 101: mod_base = OTHER; note = 2'-O-methyl modified nucleotide

SEQ ID NO: 2128 - RNA, 101 nt, synthetic construct; identical to SEQ ID NO: 1128
  source 1..101: mol_type = other RNA
  modified_base 1: mod_base = OTHER; note = 2'-O-methyl modified nucleotide with phosphorothioate linkage
  modified_base 2: mod_base = OTHER; note = 2'-O-methyl modified nucleotide with phosphorothioate linkage
  modified_base 3: mod_base = OTHER; note = 2'-O-methyl modified nucleotide with phosphorothioate linkage
  modified_base 4: mod_base = OTHER; note = 2'-O-methyl modified nucleotide
  modified_base 5: mod_base = OTHER; note = 2'-O-methyl modified nucleotide
  modified_base 8: mod_base = OTHER; note = 2'-O-methyl modified nucleotide
  modified_base 9: mod_base = OTHER; note = 2'-O-methyl modified nucleotide
  modified_base 11: mod_base = OTHER; note = 2'-O-methyl modified nucleotide
  modified_base 13: mod_base = OTHER; note = 2'-O-methyl modified nucleotide
  modified_base 18: mod_base = OTHER; note = 2'-O-methyl modified nucleotide
  modified_base 22: mod_base = OTHER; note = 2'-O-methyl modified nucleotide
  modified_base 25: mod_base = OTHER; note = 2'-O-methyl modified nucleotide
  modified_base 29: mod_base = OTHER; note = 2'-O-methyl modified nucleotide
  modified_base 30: mod_base = OTHER; note = 2'-O-methyl modified nucleotide
  modified_base 31: mod_base = OTHER; note = 2'-O-methyl modified nucleotide
  modified_base 32: mod_base = OTHER; note = 2'-O-methyl modified nucleotide
  modified_base 37: mod_base = OTHER; note = 2'-O-methyl modified nucleotide
  modified_base 38: mod_base = OTHER; note = 2'-O-methyl modified nucleotide
  modified_base 39: mod_base = OTHER; note = 2'-O-methyl modified nucleotide
  modified_base 40: mod_base = OTHER; note = 2'-O-methyl modified nucleotide
  modified_base 41: mod_base = OTHER; note = 2'-O-methyl modified nucleotide
  modified_base 42: mod_base = OTHER; note = 2'-O-methyl modified nucleotide
  modified_base 43: mod_base = OTHER; note = 2'-O-methyl modified nucleotide
  modified_base 47: mod_base = OTHER; note = 2'-O-methyl modified nucleotide
  modified_base 48: mod_base = OTHER; note = 2'-O-methyl modified nucleotide
  modified_base 51: mod_base = OTHER; note = 2'-O-methyl modified nucleotide
  modified_base 54: mod_base = OTHER; note = nucleotide with phosphorothioate linkage
  modified_base 58: mod_base = OTHER; note = 2'-O-methyl modified nucleotide
  modified_base 59: mod_base = OTHER; note = 2'-O-methyl modified nucleotide
  modified_base 61: mod_base = OTHER; note = 2'-O-methyl modified nucleotide
  modified_base 62: mod_base = OTHER; note = 2'-O-methyl modified nucleotide
  modified_base 63: mod_base = OTHER; note = 2'-O-methyl modified nucleotide
  modified_base 64: mod_base = OTHER; note = 2'-O-methyl modified nucleotide
  modified_base 65: mod_base = OTHER; note = 2'-O-methyl modified nucleotide
  modified_base 66: mod_base = OTHER; note = 2'-O-methyl modified nucleotide
  modified_base 67: mod_base = OTHER; note = 2'-O-methyl modified nucleotide
  modified_base 68: mod_base = OTHER; note = 2'-O-methyl modified nucleotide
  modified_base 69: mod_base = OTHER; note = 2'-O-methyl modified nucleotide
  modified_base 70: mod_base = OTHER; note = 2'-O-methyl modified nucleotide
  modified_base 75: mod_base = OTHER; note = 2'-O-methyl modified nucleotide
  modified_base 77: mod_base = OTHER; note = 2'-O-methyl modified nucleotide
  modified_base 80: mod_base = OTHER; note = 2'-O-methyl modified nucleotide
  modified_base 86: mod_base = OTHER; note = 2'-O-methyl modified nucleotide
  modified_base 87: mod_base = OTHER; note = 2'-O-methyl modified nucleotide
  modified_base 89: mod_base = OTHER; note = 2'-O-methyl modified nucleotide
  modified_base 90: mod_base = OTHER; note = 2'-O-methyl modified nucleotide
  modified_base 91: mod_base = OTHER; note = 2'-O-methyl modified nucleotide
  modified_base 92: mod_base = OTHER; note = 2'-O-methyl modified nucleotide
  modified_base 99: mod_base = OTHER; note = nucleotide with phosphorothioate linkage
  modified_base 100: mod_base = OTHER; note = 2'-O-methyl modified nucleotide with phosphorothioate linkage
  modified_base 101: mod_base = OTHER; note = 2'-O-methyl modified nucleotide

SEQ ID NO: 2129 - RNA, 101 nt, synthetic construct; identical to SEQ ID NO: 1129
  source 1..101: mol_type = other RNA
  modified_base 1: mod_base = OTHER; note = 2'-O-methyl modified nucleotide with phosphorothioate linkage
  modified_base 2: mod_base = OTHER; note = 2'-O-methyl modified nucleotide with phosphorothioate linkage
  modified_base 3: mod_base = OTHER; note = 2'-O-methyl modified nucleotide with phosphorothioate linkage
  modified_base 4: mod_base = OTHER; note = 2'-O-methyl modified nucleotide
  modified_base 5: mod_base = OTHER; note = 2'-O-methyl modified nucleotide
  modified_base 8: mod_base = OTHER; note = 2'-O-methyl modified nucleotide
  modified_base 9: mod_base = OTHER; note = 2'-O-methyl modified nucleotide
  modified_base 11: mod_base = OTHER; note = 2'-O-methyl modified nucleotide
  modified_base 13: mod_base = OTHER; note = 2'-O-methyl modified nucleotide
  modified_base 18: mod_base = OTHER; note = 2'-O-methyl modified nucleotide
  modified_base 22: mod_base = OTHER; note = 2'-O-methyl modified nucleotide
  modified_base 25: mod_base = OTHER; note = 2'-O-methyl modified nucleotide
  modified_base 29: mod_base = OTHER; note = 2'-O-methyl modified nucleotide
  modified_base 30: mod_base = OTHER; note = 2'-O-methyl modified nucleotide
  modified_base 31: mod_base = OTHER; note = 2'-O-methyl modified nucleotide
  modified_base 32: mod_base = OTHER; note = 2'-O-methyl modified nucleotide
  modified_base 37: mod_base = OTHER; note = 2'-O-methyl modified nucleotide
  modified_base 38: mod_base = OTHER; note = 2'-O-methyl modified nucleotide
  modified_base 39: mod_base = OTHER; note = 2'-O-methyl modified nucleotide
  modified_base 40: mod_base = OTHER; note = 2'-O-methyl modified nucleotide
  modified_base 41: mod_base = OTHER; note = 2'-O-methyl modified nucleotide
  modified_base 42: mod_base = OTHER; note = 2'-O-methyl modified nucleotide
  modified_base 43: mod_base = OTHER; note = 2'-O-methyl modified nucleotide
  modified_base 47: mod_base = OTHER; note = 2'-O-methyl modified nucleotide
  modified_base 48: mod_base = OTHER; note = 2'-O-methyl modified nucleotide
  modified_base 51: mod_base = OTHER; note = 2'-O-methyl modified nucleotide
  modified_base 54: mod_base = OTHER; note = nucleotide with phosphorothioate linkage
  modified_base 58: mod_base = OTHER; note = 2'-O-methyl modified nucleotide
  modified_base 59: mod_base = OTHER; note = 2'-O-methyl modified nucleotide
  modified_base 61: mod_base = OTHER; note = 2'-O-methyl modified nucleotide
  modified_base 62: mod_base = OTHER; note = 2'-O-methyl modified nucleotide
  modified_base 63: mod_base = OTHER; note = 2'-O-methyl modified nucleotide
  modified_base 64: mod_base = OTHER; note = 2'-O-methyl modified nucleotide
  modified_base 65: mod_base = OTHER; note = 2'-O-methyl modified nucleotide
  modified_base 66: mod_base = OTHER; note = 2'-O-methyl modified nucleotide
  modified_base 67: mod_base = OTHER; note = 2'-O-methyl modified nucleotide
  modified_base 68: mod_base = OTHER; note = 2'-O-methyl modified nucleotide
  modified_base 69: mod_base = OTHER; note = 2'-O-methyl modified nucleotide
  modified_base 70: mod_base = OTHER; note = 2'-O-methyl modified nucleotide
  modified_base 75: mod_base = OTHER; note = 2'-O-methyl modified nucleotide
  modified_base 77: mod_base = OTHER; note = 2'-O-methyl modified nucleotide
  modified_base 80: mod_base = OTHER; note = 2'-O-methyl modified nucleotide
  modified_base 86: mod_base = OTHER; note = 2'-O-methyl modified nucleotide
  modified_base 87: mod_base = OTHER; note = 2'-O-methyl modified nucleotide
  modified_base 89: mod_base = OTHER; note = 2'-O-methyl modified nucleotide
  modified_base 90: mod_base = OTHER; note = 2'-O-methyl modified nucleotide
  modified_base 91: mod_base = OTHER; note = 2'-O-methyl modified nucleotide
  modified_base 92: mod_base = OTHER; note = 2'-O-methyl modified nucleotide
  modified_base 99: mod_base = OTHER; note = nucleotide with phosphorothioate linkage
  modified_base 100: mod_base = OTHER; note = 2'-O-methyl modified nucleotide with phosphorothioate linkage
  modified_base 101: mod_base = OTHER; note = 2'-O-methyl modified nucleotide

SEQ ID NO: 2130 - RNA, 101 nt, synthetic construct; identical to SEQ ID NO: 1130
  source 1..101: mol_type = other RNA
  modified_base 1: mod_base = OTHER; note = 2'-O-methyl modified nucleotide with phosphorothioate linkage
  modified_base 2: mod_base = OTHER; note = 2'-O-methyl modified nucleotide with phosphorothioate linkage
  modified_base 3: mod_base = OTHER; note = 2'-O-methyl modified nucleotide with phosphorothioate linkage
  modified_base 4: mod_base = OTHER; note = 2'-O-methyl modified nucleotide
  modified_base 5: mod_base = OTHER; note = 2'-O-methyl modified nucleotide
  modified_base 8: mod_base = OTHER; note = 2'-O-methyl modified nucleotide
  modified_base 9: mod_base = OTHER; note = 2'-O-methyl modified nucleotide
  modified_base 11: mod_base = OTHER; note = 2'-O-methyl modified nucleotide
  modified_base 13: mod_base = OTHER; note = 2'-O-methyl modified nucleotide
  modified_base 18: mod_base = OTHER; note = 2'-O-methyl modified nucleotide
  modified_base 22: mod_base = OTHER; note = 2'-O-methyl modified nucleotide
  modified_base 25: mod_base = OTHER; note = 2'-O-methyl modified nucleotide
  modified_base 29: mod_base = OTHER; note = 2'-O-methyl modified nucleotide
  modified_base 30: mod_base = OTHER; note = 2'-O-methyl modified nucleotide
  modified_base 31: mod_base = OTHER; note = 2'-O-methyl modified nucleotide
  modified_base 32: mod_base = OTHER; note = 2'-O-methyl modified nucleotide
  modified_base 37: mod_base = OTHER; note = 2'-O-methyl modified nucleotide
  modified_base 38: mod_base = OTHER; note = 2'-O-methyl modified nucleotide
  modified_base 39: mod_base = OTHER; note = 2'-O-methyl modified nucleotide
  modified_base 40: mod_base = OTHER; note = 2'-O-methyl modified nucleotide
  modified_base 41: mod_base = OTHER; note = 2'-O-methyl modified nucleotide
  modified_base 42: mod_base = OTHER; note = 2'-O-methyl modified nucleotide
  modified_base 43: mod_base = OTHER; note = 2'-O-methyl modified nucleotide
  modified_base 47: mod_base = OTHER; note = 2'-O-methyl modified nucleotide
  modified_base 48: mod_base = OTHER; note = 2'-O-methyl modified nucleotide
  modified_base 51: mod_base = OTHER; note = 2'-O-methyl modified nucleotide
  modified_base 54: mod_base = OTHER; note = nucleotide with phosphorothioate linkage
  modified_base 58: mod_base = OTHER; note = 2'-O-methyl modified nucleotide
  modified_base 59: mod_base = OTHER; note = 2'-O-methyl modified nucleotide
  modified_base 61: mod_base = OTHER; note = 2'-O-methyl modified nucleotide
  modified_base 62: mod_base = OTHER; note = 2'-O-methyl modified nucleotide
  modified_base 63: mod_base = OTHER; note = 2'-O-methyl modified nucleotide
  modified_base 64: mod_base = OTHER; note = 2'-O-methyl modified nucleotide
  modified_base 65: mod_base = OTHER; note = 2'-O-methyl modified nucleotide
  modified_base 66: mod_base = OTHER; note = 2'-O-methyl modified nucleotide
  modified_base 67: mod_base = OTHER; note = 2'-O-methyl modified nucleotide
  modified_base 68: mod_base = OTHER; note = 2'-O-methyl modified nucleotide
  modified_base 69: mod_base = OTHER; note = 2'-O-methyl modified nucleotide
  modified_base 70: mod_base = OTHER; note = 2'-O-methyl modified nucleotide
  modified_base 75: mod_base = OTHER; note = 2'-O-methyl modified nucleotide
  modified_base 77: mod_base = OTHER; note = 2'-O-methyl modified nucleotide
  modified_base 80: mod_base = OTHER; note = 2'-O-methyl modified nucleotide
  modified_base 86: mod_base = OTHER; note = 2'-O-methyl modified nucleotide
  modified_base 87: mod_base = OTHER; note = 2'-O-methyl modified nucleotide
  modified_base 89: mod_base = OTHER; note = 2'-O-methyl modified nucleotide
  modified_base 90: mod_base = OTHER; note = 2'-O-methyl modified nucleotide
  modified_base 91: mod_base = OTHER; note = 2'-O-methyl modified nucleotide
  modified_base 92: mod_base = OTHER; note = 2'-O-methyl modified nucleotide
  modified_base 99: mod_base = OTHER; note = nucleotide with phosphorothioate linkage
  modified_base 100: mod_base = OTHER; note = 2'-O-methyl modified nucleotide with phosphorothioate linkage
  modified_base 101: mod_base = OTHER; note = 2'-O-methyl modified nucleotide

SEQ ID NO: 2131 - RNA, 101 nt, synthetic construct; identical to SEQ ID NO: 1131
  source 1..101: mol_type = other RNA
  modified_base 1: mod_base = OTHER; note = 2'-O-methyl modified nucleotide with phosphorothioate linkage
  modified_base 2: mod_base = OTHER; note = 2'-O-methyl modified nucleotide with phosphorothioate linkage
  modified_base 3: mod_base = OTHER; note = 2'-O-methyl modified nucleotide with phosphorothioate linkage
  modified_base 4: mod_base = OTHER; note = 2'-O-methyl modified nucleotide
  modified_base 5: mod_base = OTHER; note = 2'-O-methyl modified nucleotide
  modified_base 8: mod_base = OTHER; note = 2'-O-methyl modified nucleotide
  modified_base 9: mod_base = OTHER; note = 2'-O-methyl modified nucleotide
  modified_base 11: mod_base = OTHER; note = 2'-O-methyl modified nucleotide
  modified_base 13: mod_base = OTHER; note = 2'-O-methyl modified nucleotide
  modified_base 18: mod_base = OTHER; note = 2'-O-methyl modified nucleotide
  modified_base 22: mod_base = OTHER; note = 2'-O-methyl modified nucleotide
  modified_base 25: mod_base = OTHER; note = 2'-O-methyl modified nucleotide
  modified_base 29: mod_base = OTHER; note = 2'-O-methyl modified nucleotide
  modified_base 30: mod_base = OTHER; note = 2'-O-methyl modified nucleotide
  modified_base 31: mod_base = OTHER; note = 2'-O-methyl modified nucleotide
  modified_base 32: mod_base = OTHER; note = 2'-O-methyl modified nucleotide
  modified_base 37: mod_base = OTHER; note = 2'-O-methyl modified nucleotide
  modified_base 38: mod_base = OTHER; note = 2'-O-methyl modified nucleotide
  modified_base 39: mod_base = OTHER; note = 2'-O-methyl modified nucleotide
  modified_base 40: mod_base = OTHER; note = 2'-O-methyl modified nucleotide
  modified_base 41: mod_base = OTHER; note = 2'-O-methyl modified nucleotide
  modified_base 42: mod_base = OTHER; note = 2'-O-methyl modified nucleotide
  modified_base 43: mod_base = OTHER; note = 2'-O-methyl modified nucleotide
  modified_base 47: mod_base = OTHER; note = 2'-O-methyl modified nucleotide
  modified_base 48: mod_base = OTHER; note = 2'-O-methyl modified nucleotide
  modified_base 51: mod_base = OTHER; note = 2'-O-methyl modified nucleotide
  modified_base 54: mod_base = OTHER; note = nucleotide with phosphorothioate linkage
  modified_base 58: mod_base = OTHER; note = 2'-O-methyl modified nucleotide
  modified_base 59: mod_base = OTHER; note = 2'-O-methyl modified nucleotide
  modified_base 61: mod_base = OTHER; note = 2'-O-methyl modified nucleotide
  modified_base 62: mod_base = OTHER; note = 2'-O-methyl modified nucleotide
  modified_base 63: mod_base = OTHER; note = 2'-O-methyl modified nucleotide
  modified_base 64: mod_base = OTHER; note = 2'-O-methyl modified nucleotide
  modified_base 65: mod_base = OTHER; note = 2'-O-methyl modified nucleotide
  modified_base 66: mod_base = OTHER; note = 2'-O-methyl modified nucleotide
  modified_base 67: mod_base = OTHER; note = 2'-O-methyl modified nucleotide
  modified_base 68: mod_base = OTHER; note = 2'-O-methyl modified nucleotide
  modified_base 69: mod_base = OTHER; note = 2'-O-methyl modified nucleotide
  modified_base 70: mod_base = OTHER; note = 2'-O-methyl modified nucleotide
  modified_base 75: mod_base = OTHER; note = 2'-O-methyl modified nucleotide
  modified_base 77: mod_base = OTHER; note = 2'-O-methyl modified nucleotide
  modified_base 80: mod_base = OTHER; note = 2'-O-methyl modified nucleotide
  modified_base 86: mod_base = OTHER; note = 2'-O-methyl modified nucleotide
  modified_base 87: mod_base = OTHER; note = 2'-O-methyl modified nucleotide
  modified_base 89: mod_base = OTHER; note = 2'-O-methyl modified nucleotide
  modified_base 90: mod_base = OTHER; note = 2'-O-methyl modified nucleotide
  modified_base 91: mod_base = OTHER; note = 2'-O-methyl modified nucleotide
  modified_base 92: mod_base = OTHER; note = 2'-O-methyl modified nucleotide
  modified_base 99: mod_base = OTHER; note = nucleotide with phosphorothioate linkage
  modified_base 100: mod_base = OTHER; note = 2'-O-methyl modified nucleotide with phosphorothioate linkage
  modified_base 101: mod_base = OTHER; note = 2'-O-methyl modified nucleotide

SEQ ID NO: 2132 - RNA, 101 nt, synthetic construct; identical to SEQ ID NO: 1132
  source 1..101: mol_type = other RNA
  modified_base 1: mod_base = OTHER; note = 2'-O-methyl modified nucleotide with phosphorothioate linkage
  modified_base 2: mod_base = OTHER; note = 2'-O-methyl modified nucleotide with phosphorothioate linkage
  modified_base 3: mod_base = OTHER; note = 2'-O-methyl modified nucleotide with phosphorothioate linkage
  modified_base 4: mod_base = OTHER; note = 2'-O-methyl modified nucleotide
  modified_base 5: mod_base = OTHER; note = 2'-O-methyl modified nucleotide
  modified_base 8: mod_base = OTHER; note = 2'-O-methyl modified nucleotide
  modified_base 9: mod_base = OTHER; note = 2'-O-methyl modified nucleotide
  modified_base 11: mod_base = OTHER; note = 2'-O-methyl modified nucleotide
  modified_base 13: mod_base = OTHER; note = 2'-O-methyl modified nucleotide
  modified_base 18: mod_base = OTHER; note = 2'-O-methyl modified nucleotide
  modified_base 22: mod_base = OTHER; note = 2'-O-methyl modified nucleotide
  modified_base 25: mod_base = OTHER; note = 2'-O-methyl modified nucleotide
  modified_base 29: mod_base = OTHER; note = 2'-O-methyl modified nucleotide
  modified_base 30: mod_base = OTHER; note = 2'-O-methyl modified nucleotide
  modified_base 31: mod_base = OTHER; note = 2'-O-methyl modified nucleotide
  modified_base 32: mod_base = OTHER; note = 2'-O-methyl modified nucleotide
  modified_base 37: mod_base = OTHER; note = 2'-O-methyl modified nucleotide
  modified_base 38: mod_base = OTHER; note = 2'-O-methyl modified nucleotide
  modified_base 39: mod_base = OTHER; note = 2'-O-methyl modified nucleotide
  modified_base 40: mod_base = OTHER; note = 2'-O-methyl modified nucleotide
  modified_base 41: mod_base = OTHER; note = 2'-O-methyl modified nucleotide
  modified_base 42: mod_base = OTHER; note = 2'-O-methyl modified nucleotide
  modified_base 43: mod_base = OTHER; note = 2'-O-methyl modified nucleotide
  modified_base 47: mod_base = OTHER; note = 2'-O-methyl modified nucleotide
  modified_base 48: mod_base = OTHER; note = 2'-O-methyl modified nucleotide
  modified_base 51: mod_base = OTHER; note = 2'-O-methyl modified nucleotide
  modified_base 54: mod_base = OTHER; note = nucleotide with phosphorothioate linkage
  modified_base 58: mod_base = OTHER; note = 2'-O-methyl modified nucleotide
  modified_base 59: mod_base = OTHER; note = 2'-O-methyl modified nucleotide
  modified_base 61: mod_base = OTHER; note = 2'-O-methyl modified nucleotide
  modified_base 62: mod_base = OTHER; note = 2'-O-methyl modified nucleotide
  modified_base 63: mod_base = OTHER; note = 2'-O-methyl modified nucleotide
  modified_base 64: mod_base = OTHER; note = 2'-O-methyl modified nucleotide
  modified_base 65: mod_base = OTHER; note = 2'-O-methyl modified nucleotide
  modified_base 66: mod_base = OTHER; note = 2'-O-methyl modified nucleotide
  modified_base 67: mod_base = OTHER; note = 2'-O-methyl modified nucleotide
  modified_base 68: mod_base = OTHER; note = 2'-O-methyl modified nucleotide
  modified_base 69: mod_base = OTHER; note = 2'-O-methyl modified nucleotide
  modified_base 70: mod_base = OTHER; note = 2'-O-methyl modified nucleotide
  modified_base 75: mod_base = OTHER; note = 2'-O-methyl modified nucleotide
  modified_base 77: mod_base = OTHER; note = 2'-O-methyl modified nucleotide
  modified_base 80: mod_base = OTHER; note = 2'-O-methyl modified nucleotide
  modified_base 86: mod_base = OTHER; note = 2'-O-methyl modified nucleotide
  modified_base 87: mod_base = OTHER; note = 2'-O-methyl modified nucleotide
  modified_base 89: mod_base = OTHER; note = 2'-O-methyl modified nucleotide
  modified_base 90: mod_base = OTHER; note = 2'-O-methyl modified nucleotide
  modified_base 91: mod_base = OTHER; note = 2'-O-methyl modified nucleotide
  modified_base 92: mod_base = OTHER; note = 2'-O-methyl modified nucleotide
  modified_base 99: mod_base = OTHER; note = nucleotide with phosphorothioate linkage
  modified_base 100: mod_base = OTHER; note = 2'-O-methyl modified nucleotide with phosphorothioate linkage
  modified_base 101: mod_base = OTHER; note = 2'-O-methyl modified nucleotide

SEQ ID NO: 2133 - RNA, 101 nt, synthetic construct; identical to SEQ ID NO: 1133
  source 1..101: mol_type = other RNA
  modified_base 1: mod_base = OTHER; note = 2'-O-methyl modified nucleotide with phosphorothioate linkage
  modified_base 2: mod_base = OTHER; note = 2'-O-methyl modified nucleotide with phosphorothioate linkage
  modified_base 3: mod_base = OTHER; note = 2'-O-methyl modified nucleotide with phosphorothioate linkage
  modified_base 4: mod_base = OTHER; note = 2'-O-methyl modified nucleotide
  modified_base 5: mod_base = OTHER; note = 2'-O-methyl modified nucleotide
  modified_base 8: mod_base = OTHER; note = 2'-O-methyl modified nucleotide
  modified_base 9: mod_base = OTHER; note = 2'-O-methyl modified nucleotide
  modified_base 11: mod_base = OTHER; note = 2'-O-methyl modified nucleotide
  modified_base 13: mod_base = OTHER; note = 2'-O-methyl modified nucleotide
  modified_base 18: mod_base = OTHER; note = 2'-O-methyl modified nucleotide
  modified_base 22: mod_base = OTHER; note = 2'-O-methyl modified nucleotide
  modified_base 25: mod_base = OTHER; note = 2'-O-methyl modified nucleotide
  modified_base 29: mod_base = OTHER; note = 2'-O-methyl modified nucleotide
  modified_base 30: mod_base = OTHER; note = 2'-O-methyl modified nucleotide
  modified_base 31: mod_base = OTHER; note = 2'-O-methyl modified nucleotide
  modified_base 32: mod_base = OTHER; note = 2'-O-methyl modified nucleotide
  modified_base 37: mod_base = OTHER; note = 2'-O-methyl modified nucleotide
  modified_base 38: mod_base = OTHER; note = 2'-O-methyl modified nucleotide
  modified_base 39: mod_base = OTHER; note = 2'-O-methyl modified nucleotide
  modified_base 40: mod_base = OTHER; note = 2'-O-methyl modified nucleotide
  modified_base 41: mod_base = OTHER; note = 2'-O-methyl modified nucleotide
  modified_base 42: mod_base = OTHER; note = 2'-O-methyl modified nucleotide
  modified_base 43: mod_base = OTHER; note = 2'-O-methyl modified nucleotide
  modified_base 47: mod_base = OTHER; note = 2'-O-methyl modified nucleotide
  modified_base 48: mod_base = OTHER; note = 2'-O-methyl modified nucleotide
  modified_base 51: mod_base = OTHER; note = 2'-O-methyl modified nucleotide
  modified_base 54: mod_base = OTHER; note = nucleotide with phosphorothioate linkage
  modified_base 58: mod_base = OTHER; note = 2'-O-methyl modified nucleotide
  modified_base 59: mod_base = OTHER; note = 2'-O-methyl modified nucleotide
  modified_base 61: mod_base = OTHER; note = 2'-O-methyl modified nucleotide
  modified_base 62: mod_base = OTHER; note = 2'-O-methyl modified nucleotide
  modified_base 63: mod_base = OTHER; note = 2'-O-methyl modified nucleotide
  modified_base 64: mod_base = OTHER; note = 2'-O-methyl modified nucleotide
  modified_base 65: mod_base = OTHER; note = 2'-O-methyl modified nucleotide
  modified_base 66: mod_base = OTHER; note = 2'-O-methyl modified nucleotide
  modified_base 67: mod_base = OTHER; note = 2'-O-methyl modified nucleotide
  modified_base 68: mod_base = OTHER; note = 2'-O-methyl modified nucleotide
  modified_base 69: mod_base = OTHER; note = 2'-O-methyl modified nucleotide
  modified_base 70: mod_base = OTHER; note = 2'-O-methyl modified nucleotide
  modified_base 75: mod_base = OTHER; note = 2'-O-methyl modified nucleotide
  modified_base 77: mod_base = OTHER; note = 2'-O-methyl modified nucleotide
  modified_base 80: mod_base = OTHER; note = 2'-O-methyl modified nucleotide
  modified_base 86: mod_base = OTHER; note = 2'-O-methyl modified nucleotide
  modified_base 87: mod_base = OTHER; note = 2'-O-methyl modified nucleotide
  modified_base 89: mod_base = OTHER; note = 2'-O-methyl modified nucleotide
  modified_base 90: mod_base = OTHER; note = 2'-O-methyl modified nucleotide
  modified_base 91: mod_base = OTHER; note = 2'-O-methyl modified nucleotide
  modified_base 92: mod_base = OTHER; note = 2'-O-methyl modified nucleotide
  modified_base 99: mod_base = OTHER; note = nucleotide with phosphorothioate linkage
  modified_base 100: mod_base = OTHER; note = 2'-O-methyl modified nucleotide with phosphorothioate linkage
  modified_base 101: mod_base = OTHER; note = 2'-O-methyl modified nucleotide

SEQ ID NO: 2134 - RNA, 101 nt, synthetic construct; identical to SEQ ID NO: 1134
  source 1..101: mol_type = other RNA
  modified_base 1: mod_base = OTHER; note = 2'-O-methyl modified nucleotide with phosphorothioate linkage
  modified_base 2: mod_base = OTHER; note = 2'-O-methyl modified nucleotide with phosphorothioate linkage
  modified_base 3: mod_base = OTHER; note = 2'-O-methyl modified nucleotide with phosphorothioate linkage
  modified_base 4: mod_base = OTHER; note = 2'-O-methyl modified nucleotide
  modified_base 5: mod_base = OTHER; note = 2'-O-methyl modified nucleotide
  modified_base 8: mod_base = OTHER; note = 2'-O-methyl modified nucleotide
  modified_base 9: mod_base = OTHER; note = 2'-O-methyl modified nucleotide
  modified_base 11: mod_base = OTHER; note = 2'-O-methyl modified nucleotide
  modified_base 13: mod_base = OTHER; note = 2'-O-methyl modified nucleotide
  modified_base 18: mod_base = OTHER; note = 2'-O-methyl modified nucleotide
  modified_base 22: mod_base = OTHER; note = 2'-O-methyl modified nucleotide
  modified_base 25: mod_base = OTHER; note = 2'-O-methyl modified nucleotide
  modified_base 29: mod_base = OTHER; note = 2'-O-methyl modified nucleotide
  modified_base 30: mod_base = OTHER; note = 2'-O-methyl modified nucleotide
  modified_base 31: mod_base = OTHER; note = 2'-O-methyl modified nucleotide
  modified_base 32: mod_base = OTHER; note = 2'-O-methyl modified nucleotide
  modified_base 37: mod_base = OTHER; note = 2'-O-methyl modified nucleotide
  modified_base 38: mod_base = OTHER; note = 2'-O-methyl modified nucleotide
  modified_base 39: mod_base = OTHER; note = 2'-O-methyl modified nucleotide
  modified_base 40: mod_base = OTHER; note = 2'-O-methyl modified nucleotide
  modified_base 41: mod_base = OTHER; note = 2'-O-methyl modified nucleotide
  modified_base 42: mod_base = OTHER; note = 2'-O-methyl modified nucleotide
  modified_base 43: mod_base = OTHER; note = 2'-O-methyl modified nucleotide
  modified_base 47: mod_base = OTHER; note = 2'-O-methyl modified nucleotide
  modified_base 48: mod_base = OTHER; note = 2'-O-methyl modified nucleotide
  modified_base 51: mod_base = OTHER; note = 2'-O-methyl modified nucleotide
  modified_base 54: mod_base = OTHER; note = nucleotide with phosphorothioate linkage
  modified_base 58: mod_base = OTHER; note = 2'-O-methyl modified nucleotide
  modified_base 59: mod_base = OTHER; note = 2'-O-methyl modified nucleotide
  modified_base 61: mod_base = OTHER; note = 2'-O-methyl modified nucleotide
  modified_base 62: mod_base = OTHER; note = 2'-O-methyl modified nucleotide
  modified_base 63: mod_base = OTHER; note = 2'-O-methyl modified nucleotide
  modified_base 64: mod_base = OTHER; note = 2'-O-methyl modified nucleotide
  modified_base 65: mod_base = OTHER; note = 2'-O-methyl modified nucleotide
  modified_base 66: mod_base = OTHER; note = 2'-O-methyl modified nucleotide
  modified_base 67: mod_base = OTHER; note = 2'-O-methyl modified nucleotide
  modified_base 68: mod_base = OTHER; note = 2'-O-methyl modified nucleotide
  modified_base 69: mod_base = OTHER; note = 2'-O-methyl modified nucleotide
  modified_base 70: mod_base = OTHER; note = 2'-O-methyl modified nucleotide
  modified_base 75: mod_base = OTHER; note = 2'-O-methyl modified nucleotide
  modified_base 77: mod_base = OTHER; note = 2'-O-methyl modified nucleotide
  modified_base 80: mod_base = OTHER; note = 2'-O-methyl modified nucleotide
  modified_base 86: mod_base = OTHER; note = 2'-O-methyl modified nucleotide
  modified_base 87: mod_base = OTHER; note = 2'-O-methyl modified nucleotide
  modified_base 89: mod_base = OTHER; note = 2'-O-methyl modified nucleotide
  modified_base 90: mod_base = OTHER; note = 2'-O-methyl modified nucleotide
  modified_base 91: mod_base = OTHER; note = 2'-O-methyl modified nucleotide
  modified_base 92: mod_base = OTHER; note = 2'-O-methyl modified nucleotide
  modified_base 99: mod_base = OTHER; note = nucleotide with phosphorothioate linkage
  modified_base 100: mod_base = OTHER; note = 2'-O-methyl modified nucleotide with phosphorothioate linkage
  modified_base 101: mod_base = OTHER; note = 2'-O-methyl modified nucleotide

SEQ ID NO: 2135 - RNA, 101 nt, synthetic construct; identical to SEQ ID NO: 1135
  source 1..101: mol_type = other RNA
  modified_base 1: mod_base = OTHER; note = 2'-O-methyl modified nucleotide with phosphorothioate linkage
  modified_base 2: mod_base = OTHER; note = 2'-O-methyl modified nucleotide with phosphorothioate linkage
  modified_base 3: mod_base = OTHER; note = 2'-O-methyl modified nucleotide with phosphorothioate linkage
  modified_base 4: mod_base = OTHER; note = 2'-O-methyl modified nucleotide
  modified_base 5: mod_base = OTHER; note = 2'-O-methyl modified nucleotide
  modified_base 8: mod_base = OTHER; note = 2'-O-methyl modified nucleotide
  modified_base 9: mod_base = OTHER; note = 2'-O-methyl modified nucleotide
  modified_base 11: mod_base = OTHER; note = 2'-O-methyl modified nucleotide
  modified_base 13: mod_base = OTHER; note = 2'-O-methyl modified nucleotide
  modified_base 18: mod_base = OTHER; note = 2'-O-methyl modified nucleotide
  modified_base 22: mod_base = OTHER; note = 2'-O-methyl modified nucleotide
  modified_base 25: mod_base = OTHER; note = 2'-O-methyl modified nucleotide
  modified_base 29: mod_base = OTHER; note = 2'-O-methyl modified nucleotide
  modified_base 30: mod_base = OTHER; note = 2'-O-methyl modified nucleotide
  modified_base 31: mod_base = OTHER; note = 2'-O-methyl modified nucleotide
  modified_base 32: mod_base = OTHER; note = 2'-O-methyl modified nucleotide
  modified_base 37: mod_base = OTHER; note = 2'-O-methyl modified nucleotide
  modified_base 38: mod_base = OTHER; note = 2'-O-methyl modified nucleotide
  modified_base 39: mod_base = OTHER; note = 2'-O-methyl modified nucleotide
  modified_base 40: mod_base = OTHER; note = 2'-O-methyl modified nucleotide
  modified_base 41: mod_base = OTHER; note = 2'-O-methyl modified nucleotide
  modified_base 42: mod_base = OTHER; note = 2'-O-methyl modified nucleotide
  modified_base 43: mod_base = OTHER; note = 2'-O-methyl modified nucleotide
  modified_base 47: mod_base = OTHER; note = 2'-O-methyl modified nucleotide
  modified_base 48: mod_base = OTHER; note = 2'-O-methyl modified nucleotide
  modified_base 51: mod_base = OTHER; note = 2'-O-methyl modified nucleotide
  modified_base 54: mod_base = OTHER; note = nucleotide with phosphorothioate linkage
  modified_base 58: mod_base = OTHER; note = 2'-O-methyl modified nucleotide
  modified_base 59: mod_base = OTHER; note = 2'-O-methyl modified nucleotide
  modified_base 61: mod_base = OTHER; note = 2'-O-methyl modified nucleotide
  modified_base 62: mod_base = OTHER; note = 2'-O-methyl modified nucleotide
  modified_base 63: mod_base = OTHER; note = 2'-O-methyl modified nucleotide
  modified_base 64: mod_base = OTHER; note = 2'-O-methyl modified nucleotide
  modified_base 65: mod_base = OTHER; note = 2'-O-methyl modified nucleotide
  modified_base 66: mod_base = OTHER; note = 2'-O-methyl modified nucleotide
  modified_base 67: mod_base = OTHER; note = 2'-O-methyl modified nucleotide
  modified_base 68: mod_base = OTHER; note = 2'-O-methyl modified nucleotide
  modified_base 69: mod_base = OTHER; note = 2'-O-methyl modified nucleotide
  modified_base 70: mod_base = OTHER; note = 2'-O-methyl modified nucleotide
  modified_base 75: mod_base = OTHER; note = 2'-O-methyl modified nucleotide
  modified_base 77: mod_base = OTHER; note = 2'-O-methyl modified nucleotide
  modified_base 80: mod_base = OTHER; note = 2'-O-methyl modified nucleotide
  modified_base 86: mod_base = OTHER; note = 2'-O-methyl modified nucleotide
  modified_base 87: mod_base = OTHER; note = 2'-O-methyl modified nucleotide
  modified_base 89: mod_base = OTHER; note = 2'-O-methyl modified nucleotide
  modified_base 90: mod_base = OTHER; note = 2'-O-methyl modified nucleotide
  modified_base 91: mod_base = OTHER; note = 2'-O-methyl modified nucleotide
  modified_base 92: mod_base = OTHER; note = 2'-O-methyl modified nucleotide
  modified_base 99: mod_base = OTHER; note = nucleotide with phosphorothioate linkage
  modified_base 100: mod_base = OTHER; note = 2'-O-methyl modified nucleotide with phosphorothioate linkage
  modified_base 101: mod_base = OTHER; note = 2'-O-methyl modified nucleotide

SEQ ID NO: 2136 - RNA, 101 nt, synthetic construct; identical to SEQ ID NO: 1136
  source 1..101: mol_type = other RNA
  modified_base 1: mod_base = OTHER; note = 2'-O-methyl modified nucleotide with phosphorothioate linkage
  modified_base 2: mod_base = OTHER; note = 2'-O-methyl modified nucleotide with phosphorothioate linkage
  modified_base 3: mod_base = OTHER; note = 2'-O-methyl modified nucleotide with phosphorothioate linkage
  modified_base 4: mod_base = OTHER; note = 2'-O-methyl modified nucleotide
  modified_base 5: mod_base = OTHER; note = 2'-O-methyl modified nucleotide
  modified_base 8: mod_base = OTHER; note = 2'-O-methyl modified nucleotide
  modified_base 9: mod_base = OTHER; note = 2'-O-methyl modified nucleotide
  modified_base 11: mod_base = OTHER; note = 2'-O-methyl modified nucleotide
  modified_base 13: mod_base = OTHER; note = 2'-O-methyl modified nucleotide
  modified_base 18: mod_base = OTHER; note = 2'-O-methyl modified nucleotide
  modified_base 22: mod_base = OTHER; note = 2'-O-methyl modified nucleotide
  modified_base 25: mod_base = OTHER; note = 2'-O-methyl modified nucleotide
  modified_base 29: mod_base = OTHER; note = 2'-O-methyl modified nucleotide
  modified_base 30: mod_base = OTHER; note = 2'-O-methyl modified nucleotide
  modified_base 31: mod_base = OTHER; note = 2'-O-methyl modified nucleotide
  modified_base 32: mod_base = OTHER; note = 2'-O-methyl modified nucleotide
  modified_base 37: mod_base = OTHER; note = 2'-O-methyl modified nucleotide
  modified_base 38: mod_base = OTHER; note = 2'-O-methyl modified nucleotide
  modified_base 39: mod_base = OTHER; note = 2'-O-methyl modified nucleotide
  modified_base 40: mod_base = OTHER; note = 2'-O-methyl modified nucleotide
  modified_base 41: mod_base = OTHER; note = 2'-O-methyl modified nucleotide
  modified_base 42: mod_base = OTHER; note = 2'-O-methyl modified nucleotide
  modified_base 43: mod_base = OTHER; note = 2'-O-methyl modified nucleotide
  modified_base 47: mod_base = OTHER; note = 2'-O-methyl modified nucleotide
  modified_base 48: mod_base = OTHER; note = 2'-O-methyl modified nucleotide
  modified_base 51: mod_base = OTHER; note = 2'-O-methyl modified nucleotide
  modified_base 54: mod_base = OTHER; note = nucleotide with phosphorothioate linkage
  modified_base 58: mod_base = OTHER; note = 2'-O-methyl modified nucleotide
  modified_base 59: mod_base = OTHER; note = 2'-O-methyl modified nucleotide
  modified_base 61: mod_base = OTHER; note = 2'-O-methyl modified nucleotide
  modified_base 62: mod_base = OTHER; note = 2'-O-methyl modified nucleotide
  modified_base 63: mod_base = OTHER; note = 2'-O-methyl modified nucleotide
  modified_base 64: mod_base = OTHER; note = 2'-O-methyl modified nucleotide
  modified_base 65: mod_base = OTHER; note = 2'-O-methyl modified nucleotide
  modified_base 66: mod_base = OTHER; note = 2'-O-methyl modified nucleotide
  modified_base 67: mod_base = OTHER; note = 2'-O-methyl modified nucleotide
  modified_base 68: mod_base = OTHER; note = 2'-O-methyl modified nucleotide
  modified_base 69: mod_base = OTHER; note = 2'-O-methyl modified nucleotide
  modified_base 70: mod_base = OTHER; note = 2'-O-methyl modified nucleotide
  modified_base 75: mod_base = OTHER; note = 2'-O-methyl modified nucleotide
  modified_base 77: mod_base = OTHER; note = 2'-O-methyl modified nucleotide
  modified_base 80: mod_base = OTHER; note = 2'-O-methyl modified nucleotide
  modified_base 86: mod_base = OTHER; note = 2'-O-methyl modified nucleotide
  modified_base 87: mod_base = OTHER; note = 2'-O-methyl modified nucleotide
  modified_base 89: mod_base = OTHER; note = 2'-O-methyl modified nucleotide
  modified_base 90: mod_base = OTHER; note = 2'-O-methyl modified nucleotide
  modified_base 91: mod_base = OTHER; note = 2'-O-methyl modified nucleotide
  modified_base 92: mod_base = OTHER; note = 2'-O-methyl modified nucleotide
  modified_base 99: mod_base = OTHER; note = nucleotide with phosphorothioate linkage
  modified_base 100: mod_base = OTHER; note = 2'-O-methyl modified nucleotide with phosphorothioate linkage
  modified_base 101: mod_base = OTHER; note = 2'-O-methyl modified nucleotide

SEQ ID NO: 2137 - RNA, 101 nt, synthetic construct; identical to SEQ ID NO: 1137
  source 1..101: mol_type = other RNA
  modified_base 1: mod_base = OTHER; note = 2'-O-methyl modified nucleotide with phosphorothioate linkage
  modified_base 2: mod_base = OTHER; note = 2'-O-methyl modified nucleotide with phosphorothioate linkage
  modified_base 3: mod_base = OTHER; note = 2'-O-methyl modified nucleotide with phosphorothioate linkage
  modified_base 4: mod_base = OTHER; note = 2'-O-methyl modified nucleotide
  modified_base 5: mod_base = OTHER; note = 2'-O-methyl modified nucleotide
  modified_base 8: mod_base = OTHER; note = 2'-O-methyl modified nucleotide
  modified_base 9: mod_base = OTHER; note = 2'-O-methyl modified nucleotide
  modified_base 11: mod_base = OTHER; note = 2'-O-methyl modified nucleotide
  modified_base 13: mod_base = OTHER; note = 2'-O-methyl modified nucleotide
  modified_base 18: mod_base = OTHER; note = 2'-O-methyl modified nucleotide
  modified_base 22: mod_base = OTHER; note = 2'-O-methyl modified nucleotide
  modified_base 25: mod_base = OTHER; note = 2'-O-methyl modified nucleotide
  modified_base 29: mod_base = OTHER; note = 2'-O-methyl modified nucleotide
  modified_base 30: mod_base = OTHER; note = 2'-O-methyl modified nucleotide
  modified_base 31: mod_base = OTHER; note = 2'-O-methyl modified nucleotide
  modified_base 32: mod_base = OTHER; note = 2'-O-methyl modified nucleotide
  modified_base 37: mod_base = OTHER; note = 2'-O-methyl modified nucleotide
  modified_base 38: mod_base = OTHER; note = 2'-O-methyl modified nucleotide
  modified_base 39: mod_base = OTHER; note = 2'-O-methyl modified nucleotide
  modified_base 40: mod_base = OTHER; note = 2'-O-methyl modified nucleotide
  modified_base 41: mod_base = OTHER; note = 2'-O-methyl modified nucleotide
  modified_base 42: mod_base = OTHER; note = 2'-O-methyl modified nucleotide
  modified_base 43: mod_base = OTHER; note = 2'-O-methyl modified nucleotide
  modified_base 47: mod_base = OTHER; note = 2'-O-methyl modified nucleotide
  modified_base 48: mod_base = OTHER; note = 2'-O-methyl modified nucleotide
  modified_base 51: mod_base = OTHER; note = 2'-O-methyl modified nucleotide
  modified_base 54: mod_base = OTHER; note = nucleotide with phosphorothioate linkage
  modified_base 58: mod_base = OTHER; note = 2'-O-methyl modified nucleotide
  modified_base 59: mod_base = OTHER; note = 2'-O-methyl modified nucleotide
  modified_base 61: mod_base = OTHER; note = 2'-O-methyl modified nucleotide
  modified_base 62: mod_base = OTHER; note = 2'-O-methyl modified nucleotide
  modified_base 63: mod_base = OTHER; note = 2'-O-methyl modified nucleotide
  modified_base 64: mod_base = OTHER; note = 2'-O-methyl modified nucleotide
  modified_base 65: mod_base = OTHER; note = 2'-O-methyl modified nucleotide
  modified_base 66: mod_base = OTHER; note = 2'-O-methyl modified nucleotide
  modified_base 67: mod_base = OTHER; note = 2'-O-methyl modified nucleotide
  modified_base 68: mod_base = OTHER; note = 2'-O-methyl modified nucleotide
  modified_base 69: mod_base = OTHER; note = 2'-O-methyl modified nucleotide
  modified_base 70: mod_base = OTHER; note = 2'-O-methyl modified nucleotide
  modified_base 75: mod_base = OTHER; note = 2'-O-methyl modified nucleotide
  modified_base 77: mod_base = OTHER; note = 2'-O-methyl modified nucleotide
  modified_base 80: mod_base = OTHER; note = 2'-O-methyl modified nucleotide
  modified_base 86: mod_base = OTHER; note = 2'-O-methyl modified nucleotide
  modified_base 87: mod_base = OTHER; note = 2'-O-methyl modified nucleotide
  modified_base 89: mod_base = OTHER; note = 2'-O-methyl modified nucleotide
  modified_base 90: mod_base = OTHER; note = 2'-O-methyl modified nucleotide
  modified_base 91: mod_base = OTHER; note = 2'-O-methyl modified nucleotide
  modified_base 92: mod_base = OTHER; note = 2'-O-methyl modified nucleotide
  modified_base 99: mod_base = OTHER; note = nucleotide with phosphorothioate linkage
  modified_base 100: mod_base = OTHER; note = 2'-O-methyl modified nucleotide with phosphorothioate linkage
  modified_base 101: mod_base = OTHER; note = 2'-O-methyl modified nucleotide

SEQ ID NO: 2138 - RNA, 101 nt, synthetic construct; identical to SEQ ID NO: 1138
  source 1..101: mol_type = other RNA
  modified_base 1: mod_base = OTHER; note = 2'-O-methyl modified nucleotide with phosphorothioate linkage
  modified_base 2: mod_base = OTHER; note = 2'-O-methyl modified nucleotide with phosphorothioate linkage
  modified_base 3: mod_base = OTHER; note = 2'-O-methyl modified nucleotide with phosphorothioate linkage
  modified_base 4: mod_base = OTHER; note = 2'-O-methyl modified nucleotide
  modified_base 5: mod_base = OTHER; note = 2'-O-methyl modified nucleotide
  modified_base 8: mod_base = OTHER; note = 2'-O-methyl modified nucleotide
  modified_base 9: mod_base = OTHER; note = 2'-O-methyl modified nucleotide
  modified_base 11: mod_base = OTHER; note = 2'-O-methyl modified nucleotide
  modified_base 13: mod_base = OTHER; note = 2'-O-methyl modified nucleotide
  modified_base 18: mod_base = OTHER; note = 2'-O-methyl modified nucleotide
  modified_base 22: mod_base = OTHER; note = 2'-O-methyl modified nucleotide
  modified_base 25: mod_base = OTHER; note = 2'-O-methyl modified nucleotide
  modified_base 29: mod_base = OTHER; note = 2'-O-methyl modified nucleotide
  modified_base 30: mod_base = OTHER; note = 2'-O-methyl modified nucleotide
  modified_base 31: mod_base = OTHER; note = 2'-O-methyl modified nucleotide
  modified_base 32: mod_base = OTHER; note = 2'-O-methyl modified nucleotide
  modified_base 37: mod_base = OTHER; note = 2'-O-methyl modified nucleotide
  modified_base 38: mod_base = OTHER; note = 2'-O-methyl modified nucleotide
  modified_base 39: mod_base = OTHER; note = 2'-O-methyl modified nucleotide
  modified_base 40: mod_base = OTHER; note = 2'-O-methyl modified nucleotide
  modified_base 41: mod_base = OTHER; note = 2'-O-methyl modified nucleotide
  modified_base 42: mod_base = OTHER; note = 2'-O-methyl modified nucleotide
  modified_base 43: mod_base = OTHER; note = 2'-O-methyl modified nucleotide
  modified_base 47: mod_base = OTHER; note = 2'-O-methyl modified nucleotide
  modified_base 48: mod_base = OTHER; note = 2'-O-methyl modified nucleotide
  modified_base 51: mod_base = OTHER; note = 2'-O-methyl modified nucleotide
  modified_base 54: mod_base = OTHER; note = nucleotide with phosphorothioate linkage
  modified_base 58: mod_base = OTHER; note = 2'-O-methyl modified nucleotide
  modified_base 59: mod_base = OTHER; note = 2'-O-methyl modified nucleotide
  modified_base 61: mod_base = OTHER; note = 2'-O-methyl modified nucleotide
  modified_base 62: mod_base = OTHER; note = 2'-O-methyl modified nucleotide
  modified_base 63: mod_base = OTHER; note = 2'-O-methyl modified nucleotide
  modified_base 64: mod_base = OTHER; note = 2'-O-methyl modified nucleotide
  modified_base 65: mod_base = OTHER; note = 2'-O-methyl modified nucleotide
  modified_base 66: mod_base = OTHER; note = 2'-O-methyl modified nucleotide
  modified_base 67: mod_base = OTHER; note = 2'-O-methyl modified nucleotide
  modified_base 68: mod_base = OTHER; note = 2'-O-methyl modified nucleotide
  modified_base 69: mod_base = OTHER; note = 2'-O-methyl modified nucleotide
  modified_base 70: mod_base = OTHER; note = 2'-O-methyl modified nucleotide
  modified_base 75: mod_base = OTHER; note = 2'-O-methyl modified nucleotide
  modified_base 77: mod_base = OTHER; note = 2'-O-methyl modified nucleotide
  modified_base 80: mod_base = OTHER; note = 2'-O-methyl modified nucleotide
  modified_base 86: mod_base = OTHER; note = 2'-O-methyl modified nucleotide
  modified_base 87: mod_base = OTHER; note = 2'-O-methyl modified nucleotide
  modified_base 89: mod_base = OTHER; note = 2'-O-methyl modified nucleotide
  modified_base 90: mod_base = OTHER; note = 2'-O-methyl modified nucleotide
  modified_base 91: mod_base = OTHER; note = 2'-O-methyl modified nucleotide
  modified_base 92: mod_base = OTHER; note = 2'-O-methyl modified nucleotide
  modified_base 99: mod_base = OTHER; note = nucleotide with phosphorothioate linkage
  modified_base 100: mod_base = OTHER; note = 2'-O-methyl modified nucleotide with phosphorothioate linkage
  modified_base 101: mod_base = OTHER; note = 2'-O-methyl modified nucleotide

SEQ ID NO: 2139 - RNA, 101 nt, synthetic construct; identical to SEQ ID NO: 1139
  source 1..101: mol_type = other RNA
  modified_base 1: mod_base = OTHER; note = 2'-O-methyl modified nucleotide with phosphorothioate linkage
  modified_base 2: mod_base = OTHER; note = 2'-O-methyl modified nucleotide with phosphorothioate linkage
  modified_base 3: mod_base = OTHER; note = 2'-O-methyl modified nucleotide with phosphorothioate linkage
  modified_base 4: mod_base = OTHER; note = 2'-O-methyl modified nucleotide
  modified_base 5: mod_base = OTHER; note = 2'-O-methyl modified nucleotide
  modified_base 8: mod_base = OTHER; note = 2'-O-methyl modified nucleotide
  modified_base 9: mod_base = OTHER; note = 2'-O-methyl modified nucleotide
  modified_base 11: mod_base = OTHER; note = 2'-O-methyl modified nucleotide
  modified_base 13: mod_base = OTHER; note = 2'-O-methyl modified nucleotide
  modified_base 18: mod_base = OTHER; note = 2'-O-methyl modified nucleotide
  modified_base 22: mod_base = OTHER; note = 2'-O-methyl modified nucleotide
  modified_base 25: mod_base = OTHER; note = 2'-O-methyl modified nucleotide
  modified_base 29: mod_base = OTHER; note = 2'-O-methyl modified nucleotide
  modified_base 30: mod_base = OTHER; note = 2'-O-methyl modified nucleotide
  modified_base 31: mod_base = OTHER; note = 2'-O-methyl modified nucleotide
  modified_base 32: mod_base = OTHER; note = 2'-O-methyl modified nucleotide
  modified_base 37: mod_base = OTHER; note = 2'-O-methyl modified nucleotide
  modified_base 38: mod_base = OTHER; note = 2'-O-methyl modified nucleotide
  modified_base 39: mod_base = OTHER; note = 2'-O-methyl modified nucleotide
  modified_base 40: mod_base = OTHER; note = 2'-O-methyl modified nucleotide
  modified_base 41: mod_base = OTHER; note = 2'-O-methyl modified nucleotide
  modified_base 42: mod_base = OTHER; note = 2'-O-methyl modified nucleotide
  modified_base 43: mod_base = OTHER; note = 2'-O-methyl modified nucleotide
  modified_base 47: mod_base = OTHER; note = 2'-O-methyl modified nucleotide
  modified_base 48: mod_base = OTHER; note = 2'-O-methyl modified nucleotide
  modified_base 51: mod_base = OTHER; note = 2'-O-methyl modified nucleotide
  modified_base 54: mod_base = OTHER; note = nucleotide with phosphorothioate linkage
  modified_base 58: mod_base = OTHER; note = 2'-O-methyl modified nucleotide
  modified_base 59: mod_base = OTHER; note = 2'-O-methyl modified nucleotide
  modified_base 61: mod_base = OTHER; note = 2'-O-methyl modified nucleotide
  modified_base 62: mod_base = OTHER; note = 2'-O-methyl modified nucleotide
  modified_base 63: mod_base = OTHER; note = 2'-O-methyl modified nucleotide
  modified_base 64: mod_base = OTHER; note = 2'-O-methyl modified nucleotide
  modified_base 65: mod_base = OTHER; note = 2'-O-methyl modified nucleotide
  modified_base 66: mod_base = OTHER; note = 2'-O-methyl modified nucleotide
  modified_base 67: mod_base = OTHER; note = 2'-O-methyl modified nucleotide
  modified_base 68: mod_base = OTHER; note = 2'-O-methyl modified nucleotide
  modified_base 69: mod_base = OTHER; note = 2'-O-methyl modified nucleotide
  modified_base 70: mod_base = OTHER; note = 2'-O-methyl modified nucleotide
  modified_base 75: mod_base = OTHER; note = 2'-O-methyl modified nucleotide
  modified_base 77: mod_base = OTHER; note = 2'-O-methyl modified nucleotide
  modified_base 80: mod_base = OTHER; note = 2'-O-methyl modified nucleotide
  modified_base 86: mod_base = OTHER; note = 2'-O-methyl modified nucleotide
  modified_base 87: mod_base = OTHER; note = 2'-O-methyl modified nucleotide
  modified_base 89: mod_base = OTHER; note = 2'-O-methyl modified nucleotide
  modified_base 90: mod_base = OTHER; note = 2'-O-methyl modified nucleotide
  modified_base 91: mod_base = OTHER; note = 2'-O-methyl modified nucleotide
  modified_base 92: mod_base = OTHER; note = 2'-O-methyl modified nucleotide
  modified_base 99: mod_base = OTHER; note = nucleotide with phosphorothioate linkage
  modified_base 100: mod_base = OTHER; note = 2'-O-methyl modified nucleotide with phosphorothioate linkage
  modified_base 101: mod_base = OTHER; note = 2'-O-methyl modified nucleotide

SEQ ID NO: 2140 - RNA, 101 nt, synthetic construct; identical to SEQ ID NO: 1140
  source 1..101: mol_type = other RNA
  modified_base 1: mod_base = OTHER; note = 2'-O-methyl modified nucleotide with phosphorothioate linkage
  modified_base 2: mod_base = OTHER; note = 2'-O-methyl modified nucleotide with phosphorothioate linkage
  modified_base 3: mod_base = OTHER; note = 2'-O-methyl modified nucleotide with phosphorothioate linkage
  modified_base 4: mod_base = OTHER; note = 2'-O-methyl modified nucleotide
  modified_base 5: mod_base = OTHER; note = 2'-O-methyl modified nucleotide
  modified_base 8: mod_base = OTHER; note = 2'-O-methyl modified nucleotide
  modified_base 9: mod_base = OTHER; note = 2'-O-methyl modified nucleotide
  modified_base 11: mod_base = OTHER; note = 2'-O-methyl modified nucleotide
  modified_base 13: mod_base = OTHER; note = 2'-O-methyl modified nucleotide
  modified_base 18: mod_base = OTHER; note = 2'-O-methyl modified nucleotide
  modified_base 22: mod_base = OTHER; note = 2'-O-methyl modified nucleotide
  modified_base 25: mod_base = OTHER; note = 2'-O-methyl modified nucleotide
  modified_base 29: mod_base = OTHER; note = 2'-O-methyl modified nucleotide
  modified_base 30: mod_base = OTHER; note = 2'-O-methyl modified nucleotide
  modified_base 31: mod_base = OTHER; note = 2'-O-methyl modified nucleotide
  modified_base 32: mod_base = OTHER; note = 2'-O-methyl modified nucleotide
  modified_base 37: mod_base = OTHER; note = 2'-O-methyl modified nucleotide
  modified_base 38: mod_base = OTHER; note = 2'-O-methyl modified nucleotide
  modified_base 39: mod_base = OTHER; note = 2'-O-methyl modified nucleotide
  modified_base 40: mod_base = OTHER; note = 2'-O-methyl modified nucleotide
  modified_base 41: mod_base = OTHER; note = 2'-O-methyl modified nucleotide
  modified_base 42: mod_base = OTHER; note = 2'-O-methyl modified nucleotide
  modified_base 43: mod_base = OTHER; note = 2'-O-methyl modified nucleotide
  modified_base 47: mod_base = OTHER; note = 2'-O-methyl modified nucleotide
  modified_base 48: mod_base = OTHER; note = 2'-O-methyl modified nucleotide
  modified_base 51: mod_base = OTHER; note = 2'-O-methyl modified nucleotide
  modified_base 54: mod_base = OTHER; note = nucleotide with phosphorothioate linkage
  modified_base 58: mod_base = OTHER; note = 2'-O-methyl modified nucleotide
  modified_base 59: mod_base = OTHER; note = 2'-O-methyl modified nucleotide
  modified_base 61: mod_base = OTHER; note = 2'-O-methyl modified nucleotide
  modified_base 62: mod_base = OTHER; note = 2'-O-methyl modified nucleotide
  modified_base 63: mod_base = OTHER; note = 2'-O-methyl modified nucleotide
  modified_base 64: mod_base = OTHER; note = 2'-O-methyl modified nucleotide
  modified_base 65: mod_base = OTHER; note = 2'-O-methyl modified nucleotide
  modified_base 66: mod_base = OTHER; note = 2'-O-methyl modified nucleotide
  modified_base 67: mod_base = OTHER; note = 2'-O-methyl modified nucleotide
  modified_base 68: mod_base = OTHER; note = 2'-O-methyl modified nucleotide
  modified_base 69: mod_base = OTHER; note = 2'-O-methyl modified nucleotide
  modified_base 70: mod_base = OTHER; note = 2'-O-methyl modified nucleotide
  modified_base 75: mod_base = OTHER; note = 2'-O-methyl modified nucleotide
  modified_base 77: mod_base = OTHER; note = 2'-O-methyl modified nucleotide
  modified_base 80: mod_base = OTHER; note = 2'-O-methyl modified nucleotide
  modified_base 86: mod_base = OTHER; note = 2'-O-methyl modified nucleotide
  modified_base 87: mod_base = OTHER; note = 2'-O-methyl modified nucleotide
  modified_base 89: mod_base = OTHER; note = 2'-O-methyl modified nucleotide
  modified_base 90: mod_base = OTHER; note = 2'-O-methyl modified nucleotide
  modified_base 91: mod_base = OTHER; note = 2'-O-methyl modified nucleotide
  modified_base 92: mod_base = OTHER; note = 2'-O-methyl modified nucleotide
  modified_base 99: mod_base = OTHER; note = nucleotide with phosphorothioate linkage
  modified_base 100: mod_base = OTHER; note = 2'-O-methyl modified nucleotide with phosphorothioate linkage
  modified_base 101: mod_base = OTHER; note = 2'-O-methyl modified nucleotide

SEQ ID NO: 2141 - RNA, 101 nt, synthetic construct; identical to SEQ ID NO: 1141
  source 1..101: mol_type = other RNA
  modified_base 1: mod_base = OTHER; note = 2'-O-methyl modified nucleotide with phosphorothioate linkage
  modified_base 2: mod_base = OTHER; note = 2'-O-methyl modified nucleotide with phosphorothioate linkage
  modified_base 3: mod_base = OTHER; note = 2'-O-methyl modified nucleotide with phosphorothioate linkage
  modified_base 4: mod_base = OTHER; note = 2'-O-methyl modified nucleotide
  modified_base 5: mod_base = OTHER; note = 2'-O-methyl modified nucleotide
  modified_base 8: mod_base = OTHER; note = 2'-O-methyl modified nucleotide
  modified_base 9: mod_base = OTHER; note = 2'-O-methyl modified nucleotide
  modified_base 11: mod_base = OTHER; note = 2'-O-methyl modified nucleotide
  modified_base 13: mod_base = OTHER; note = 2'-O-methyl modified nucleotide
  modified_base 18: mod_base = OTHER; note = 2'-O-methyl modified nucleotide
  modified_base 22: mod_base = OTHER; note = 2'-O-methyl modified nucleotide
  modified_base 25: mod_base = OTHER; note = 2'-O-methyl modified nucleotide
  modified_base 29: mod_base = OTHER; note = 2'-O-methyl modified nucleotide
  modified_base 30: mod_base = OTHER; note = 2'-O-methyl modified nucleotide
  modified_base 31: mod_base = OTHER; note = 2'-O-methyl modified nucleotide
  modified_base 32: mod_base = OTHER; note = 2'-O-methyl modified nucleotide
  modified_base 37: mod_base = OTHER; note = 2'-O-methyl modified nucleotide
  modified_base 38: mod_base = OTHER; note = 2'-O-methyl modified nucleotide
  modified_base 39: mod_base = OTHER; note = 2'-O-methyl modified nucleotide
  modified_base 40: mod_base = OTHER; note = 2'-O-methyl modified nucleotide
  modified_base 41: mod_base = OTHER; note = 2'-O-methyl modified nucleotide
  modified_base 42: mod_base = OTHER; note = 2'-O-methyl modified nucleotide
  modified_base 43: mod_base = OTHER; note = 2'-O-methyl modified nucleotide
  modified_base 47: mod_base = OTHER; note = 2'-O-methyl modified nucleotide
  modified_base 48: mod_base = OTHER; note = 2'-O-methyl modified nucleotide
  modified_base 51: mod_base = OTHER; note = 2'-O-methyl modified nucleotide
  modified_base 54: mod_base = OTHER; note = nucleotide with phosphorothioate linkage
  modified_base 58: mod_base = OTHER; note = 2'-O-methyl modified nucleotide
  modified_base 59: mod_base = OTHER; note = 2'-O-methyl modified nucleotide
  modified_base 61: mod_base = OTHER; note = 2'-O-methyl modified nucleotide
  modified_base 62: mod_base = OTHER; note = 2'-O-methyl modified nucleotide
  modified_base 63: mod_base = OTHER; note = 2'-O-methyl modified nucleotide
  modified_base 64: mod_base = OTHER; note = 2'-O-methyl modified nucleotide
  modified_base 65: mod_base = OTHER; note = 2'-O-methyl modified nucleotide
  modified_base 66: mod_base = OTHER; note = 2'-O-methyl modified nucleotide
  modified_base 67: mod_base = OTHER; note = 2'-O-methyl modified nucleotide
  modified_base 68: mod_base = OTHER; note = 2'-O-methyl modified nucleotide
  modified_base 69: mod_base = OTHER; note = 2'-O-methyl modified nucleotide
  modified_base 70: mod_base = OTHER; note = 2'-O-methyl modified nucleotide
  modified_base 75: mod_base = OTHER; note = 2'-O-methyl modified nucleotide
  modified_base 77: mod_base = OTHER; note = 2'-O-methyl modified nucleotide
  modified_base 80: mod_base = OTHER; note = 2'-O-methyl modified nucleotide
  modified_base 86: mod_base = OTHER; note = 2'-O-methyl modified nucleotide
  modified_base 87: mod_base = OTHER; note = 2'-O-methyl modified nucleotide
  modified_base 89: mod_base = OTHER; note = 2'-O-methyl modified nucleotide
  modified_base 90: mod_base = OTHER; note = 2'-O-methyl modified nucleotide
  modified_base 91: mod_base = OTHER; note = 2'-O-methyl modified nucleotide
  modified_base 92: mod_base = OTHER; note = 2'-O-methyl modified nucleotide
  modified_base 99: mod_base = OTHER; note = nucleotide with phosphorothioate linkage
  modified_base 100: mod_base = OTHER; note = 2'-O-methyl modified nucleotide with phosphorothioate linkage
  modified_base 101: mod_base = OTHER; note = 2'-O-methyl modified nucleotide

SEQ ID NO: 2142 - RNA, 101 nt, synthetic construct; identical to SEQ ID NO: 1142
  source 1..101: mol_type = other RNA
  modified_base 1: mod_base = OTHER; note = 2'-O-methyl modified nucleotide with phosphorothioate linkage
  modified_base 2: mod_base = OTHER; note = 2'-O-methyl modified nucleotide with phosphorothioate linkage
  modified_base 3: mod_base = OTHER; note = 2'-O-methyl modified nucleotide with phosphorothioate linkage
  modified_base 4: mod_base = OTHER; note = 2'-O-methyl modified nucleotide
  modified_base 5: mod_base = OTHER; note = 2'-O-methyl modified nucleotide
  modified_base 8: mod_base = OTHER; note = 2'-O-methyl modified nucleotide
  modified_base 9: mod_base = OTHER; note = 2'-O-methyl modified nucleotide
  modified_base 11: mod_base = OTHER; note = 2'-O-methyl modified nucleotide
  modified_base 13: mod_base = OTHER; note = 2'-O-methyl modified nucleotide
  modified_base 18: mod_base = OTHER; note = 2'-O-methyl modified nucleotide
  modified_base 22: mod_base = OTHER; note = 2'-O-methyl modified nucleotide
  modified_base 25: mod_base = OTHER; note = 2'-O-methyl modified nucleotide
  modified_base 29: mod_base = OTHER; note = 2'-O-methyl modified nucleotide
  modified_base 30: mod_base = OTHER; note = 2'-O-methyl modified nucleotide
  modified_base 31: mod_base = OTHER; note = 2'-O-methyl modified nucleotide
  modified_base 32: mod_base = OTHER; note = 2'-O-methyl modified nucleotide
  modified_base 37: mod_base = OTHER; note = 2'-O-methyl modified nucleotide
  modified_base 38: mod_base = OTHER; note = 2'-O-methyl modified nucleotide
  modified_base 39: mod_base = OTHER; note = 2'-O-methyl modified nucleotide
  modified_base 40: mod_base = OTHER; note = 2'-O-methyl modified nucleotide
  modified_base 41: mod_base = OTHER; note = 2'-O-methyl modified nucleotide
  modified_base 42: mod_base = OTHER; note = 2'-O-methyl modified nucleotide
  modified_base 43: mod_base = OTHER; note = 2'-O-methyl modified nucleotide
  modified_base 47: mod_base = OTHER; note = 2'-O-methyl modified nucleotide
  modified_base 48: mod_base = OTHER; note = 2'-O-methyl modified nucleotide
  modified_base 51: mod_base = OTHER; note = 2'-O-methyl modified nucleotide
  modified_base 54: mod_base = OTHER; note = nucleotide with phosphorothioate linkage
  modified_base 58: mod_base = OTHER; note = 2'-O-methyl modified nucleotide
  modified_base 59: mod_base = OTHER; note = 2'-O-methyl modified nucleotide
  modified_base 61: mod_base = OTHER; note = 2'-O-methyl modified nucleotide
  modified_base 62: mod_base = OTHER; note = 2'-O-methyl modified nucleotide
  modified_base 63: mod_base = OTHER; note = 2'-O-methyl modified nucleotide
  modified_base 64: mod_base = OTHER; note = 2'-O-methyl modified nucleotide
  modified_base 65: mod_base = OTHER; note = 2'-O-methyl modified nucleotide
  modified_base 66: mod_base = OTHER; note = 2'-O-methyl modified nucleotide
  modified_base 67: mod_base = OTHER; note = 2'-O-methyl modified nucleotide
  modified_base 68: mod_base = OTHER; note = 2'-O-methyl modified nucleotide
  modified_base 69: mod_base = OTHER; note = 2'-O-methyl modified nucleotide
  modified_base 70: mod_base = OTHER; note = 2'-O-methyl modified nucleotide
  modified_base 75: mod_base = OTHER; note = 2'-O-methyl modified nucleotide
  modified_base 77: mod_base = OTHER; note = 2'-O-methyl modified nucleotide
  modified_base 80: mod_base = OTHER; note = 2'-O-methyl modified nucleotide
  modified_base 86: mod_base = OTHER; note = 2'-O-methyl modified nucleotide
  modified_base 87: mod_base = OTHER; note = 2'-O-methyl modified nucleotide
  modified_base 89: mod_base = OTHER; note = 2'-O-methyl modified nucleotide
  modified_base 90: mod_base = OTHER; note = 2'-O-methyl modified nucleotide
  modified_base 91: mod_base = OTHER; note = 2'-O-methyl modified nucleotide
  modified_base 92: mod_base = OTHER; note = 2'-O-methyl modified nucleotide
  modified_base 99: mod_base = OTHER; note = nucleotide with phosphorothioate linkage
  modified_base 100: mod_base = OTHER; note = 2'-O-methyl modified nucleotide with phosphorothioate linkage
  modified_base 101: mod_base = OTHER; note = 2'-O-methyl modified nucleotide

SEQ ID NO: 2143 - RNA, 101 nt, synthetic construct; identical to SEQ ID NO: 1143
  source 1..101: mol_type = other RNA
  modified_base 1: mod_base = OTHER; note = 2'-O-methyl modified nucleotide with phosphorothioate linkage
  modified_base 2: mod_base = OTHER; note = 2'-O-methyl modified nucleotide with phosphorothioate linkage
  modified_base 3: mod_base = OTHER; note = 2'-O-methyl modified nucleotide with phosphorothioate linkage
  modified_base 4: mod_base = OTHER; note = 2'-O-methyl modified nucleotide
  modified_base 5: mod_base = OTHER; note = 2'-O-methyl modified nucleotide
  modified_base 8: mod_base = OTHER; note = 2'-O-methyl modified nucleotide
  modified_base 9: mod_base = OTHER; note = 2'-O-methyl modified nucleotide
  modified_base 11: mod_base = OTHER; note = 2'-O-methyl modified nucleotide
  modified_base 13: mod_base = OTHER; note = 2'-O-methyl modified nucleotide
  modified_base 18: mod_base = OTHER; note = 2'-O-methyl modified nucleotide
  modified_base 22: mod_base = OTHER; note = 2'-O-methyl modified nucleotide
  modified_base 25: mod_base = OTHER; note = 2'-O-methyl modified nucleotide
  modified_base 29: mod_base = OTHER; note = 2'-O-methyl modified nucleotide
  modified_base 30: mod_base = OTHER; note = 2'-O-methyl modified nucleotide
  modified_base 31: mod_base = OTHER; note = 2'-O-methyl modified nucleotide
  modified_base 32: mod_base = OTHER; note = 2'-O-methyl modified nucleotide
  modified_base 37: mod_base = OTHER; note = 2'-O-methyl modified nucleotide
  modified_base 38: mod_base = OTHER; note = 2'-O-methyl modified nucleotide
  modified_base 39: mod_base = OTHER; note = 2'-O-methyl modified nucleotide
  modified_base 40: mod_base = OTHER; note = 2'-O-methyl modified nucleotide
  modified_base 41: mod_base = OTHER; note = 2'-O-methyl modified nucleotide
  modified_base 42: mod_base = OTHER; note = 2'-O-methyl modified nucleotide
  modified_base 43: mod_base = OTHER; note = 2'-O-methyl modified nucleotide
  modified_base 47: mod_base = OTHER; note = 2'-O-methyl modified nucleotide
  modified_base 48: mod_base = OTHER; note = 2'-O-methyl modified nucleotide
  modified_base 51: mod_base = OTHER; note = 2'-O-methyl modified nucleotide
  modified_base 54: mod_base = OTHER; note = nucleotide with phosphorothioate linkage
  modified_base 58: mod_base = OTHER; note = 2'-O-methyl modified nucleotide
  modified_base 59: mod_base = OTHER; note = 2'-O-methyl modified nucleotide
  modified_base 61: mod_base = OTHER; note = 2'-O-methyl modified nucleotide
  modified_base 62: mod_base = OTHER; note = 2'-O-methyl modified nucleotide
  modified_base 63: mod_base = OTHER; note = 2'-O-methyl modified nucleotide
  modified_base 64: mod_base = OTHER; note = 2'-O-methyl modified nucleotide
  modified_base 65: mod_base = OTHER; note = 2'-O-methyl modified nucleotide
  modified_base 66: mod_base = OTHER; note = 2'-O-methyl modified nucleotide
  modified_base 67: mod_base = OTHER; note = 2'-O-methyl modified nucleotide
  modified_base 68: mod_base = OTHER; note = 2'-O-methyl modified nucleotide
  modified_base 69: mod_base = OTHER; note = 2'-O-methyl modified nucleotide
  modified_base 70: mod_base = OTHER; note = 2'-O-methyl modified nucleotide
  modified_base 75: mod_base = OTHER; note = 2'-O-methyl modified nucleotide
  modified_base 77: mod_base = OTHER; note = 2'-O-methyl modified nucleotide
  modified_base 80: mod_base = OTHER; note = 2'-O-methyl modified nucleotide
  modified_base 86: mod_base = OTHER; note = 2'-O-methyl modified nucleotide
  modified_base 87: mod_base = OTHER; note = 2'-O-methyl modified nucleotide
  modified_base 89: mod_base = OTHER; note = 2'-O-methyl modified nucleotide
  modified_base 90: mod_base = OTHER; note = 2'-O-methyl modified nucleotide
  modified_base 91: mod_base = OTHER; note = 2'-O-methyl modified nucleotide
  modified_base 92: mod_base = OTHER; note = 2'-O-methyl modified nucleotide
  modified_base 99: mod_base = OTHER; note = nucleotide with phosphorothioate linkage
  modified_base 100: mod_base = OTHER; note = 2'-O-methyl modified nucleotide with phosphorothioate linkage
  modified_base 101: mod_base = OTHER; note = 2'-O-methyl modified nucleotide

SEQ ID NO: 2144 - RNA, 101 nt, synthetic construct; identical to SEQ ID NO: 1144
  source 1..101: mol_type = other RNA
  modified_base 1: mod_base = OTHER; note = 2'-O-methyl modified nucleotide with phosphorothioate linkage
  modified_base 2: mod_base = OTHER; note = 2'-O-methyl modified nucleotide with phosphorothioate linkage
  modified_base 3: mod_base = OTHER; note = 2'-O-methyl modified nucleotide with phosphorothioate linkage
  modified_base 4: mod_base = OTHER; note = 2'-O-methyl modified nucleotide
  modified_base 5: mod_base = OTHER; note = 2'-O-methyl modified nucleotide
  modified_base 8: mod_base = OTHER; note = 2'-O-methyl modified nucleotide
  modified_base 9: mod_base = OTHER; note = 2'-O-methyl modified nucleotide
  modified_base 11: mod_base = OTHER; note = 2'-O-methyl modified nucleotide
  modified_base 13: mod_base = OTHER; note = 2'-O-methyl modified nucleotide
  modified_base 18: mod_base = OTHER; note = 2'-O-methyl modified nucleotide
  modified_base 22: mod_base = OTHER; note = 2'-O-methyl modified nucleotide
  modified_base 25: mod_base = OTHER; note = 2'-O-methyl modified nucleotide
  modified_base 29: mod_base = OTHER; note = 2'-O-methyl modified nucleotide
  modified_base 30: mod_base = OTHER; note = 2'-O-methyl modified nucleotide
  modified_base 31: mod_base = OTHER; note = 2'-O-methyl modified nucleotide
  modified_base 32: mod_base = OTHER; note = 2'-O-methyl modified nucleotide
  modified_base 37: mod_base = OTHER; note = 2'-O-methyl modified nucleotide
  modified_base 38: mod_base = OTHER; note = 2'-O-methyl modified nucleotide
  modified_base 39: mod_base = OTHER; note = 2'-O-methyl modified nucleotide
  modified_base 40: mod_base = OTHER; note = 2'-O-methyl modified nucleotide
  modified_base 41: mod_base = OTHER; note = 2'-O-methyl modified nucleotide
  modified_base 42: mod_base = OTHER; note = 2'-O-methyl modified nucleotide
  modified_base 43: mod_base = OTHER; note = 2'-O-methyl modified nucleotide
  modified_base 47: mod_base = OTHER; note = 2'-O-methyl modified nucleotide
  modified_base 48: mod_base = OTHER; note = 2'-O-methyl modified nucleotide
  modified_base 51: mod_base = OTHER; note = 2'-O-methyl modified nucleotide
  modified_base 54: mod_base = OTHER; note = nucleotide with phosphorothioate linkage
  modified_base 58: mod_base = OTHER; note = 2'-O-methyl modified nucleotide
  modified_base 59: mod_base = OTHER; note = 2'-O-methyl modified nucleotide
  modified_base 61: mod_base = OTHER; note = 2'-O-methyl modified nucleotide
  modified_base 62: mod_base = OTHER; note = 2'-O-methyl modified nucleotide
  modified_base 63: mod_base = OTHER; note = 2'-O-methyl modified nucleotide
  modified_base 64: mod_base = OTHER; note = 2'-O-methyl modified nucleotide
  modified_base 65: mod_base = OTHER; note = 2'-O-methyl modified nucleotide
  modified_base 66: mod_base = OTHER; note = 2'-O-methyl modified nucleotide
  modified_base 67: mod_base = OTHER; note = 2'-O-methyl modified nucleotide
  modified_base 68: mod_base = OTHER; note = 2'-O-methyl modified nucleotide
  modified_base 69: mod_base = OTHER; note = 2'-O-methyl modified nucleotide
  modified_base 70: mod_base = OTHER; note = 2'-O-methyl modified nucleotide
  modified_base 75: mod_base = OTHER; note = 2'-O-methyl modified nucleotide
  modified_base 77: mod_base = OTHER; note = 2'-O-methyl modified nucleotide
  modified_base 80: mod_base = OTHER; note = 2'-O-methyl modified nucleotide
  modified_base 86: mod_base = OTHER; note = 2'-O-methyl modified nucleotide
  modified_base 87: mod_base = OTHER; note = 2'-O-methyl modified nucleotide
  modified_base 89: mod_base = OTHER; note = 2'-O-methyl modified nucleotide
  modified_base 90: mod_base = OTHER; note = 2'-O-methyl modified nucleotide
  modified_base 91: mod_base = OTHER; note = 2'-O-methyl modified nucleotide
  modified_base 92: mod_base = OTHER; note = 2'-O-methyl modified nucleotide
  modified_base 99: mod_base = OTHER; note = nucleotide with phosphorothioate linkage
  modified_base 100: mod_base = OTHER; note = 2'-O-methyl modified nucleotide with phosphorothioate linkage
  modified_base 101: mod_base = OTHER; note = 2'-O-methyl modified nucleotide

SEQ ID NO: 2145 - RNA, 101 nt, synthetic construct; identical to SEQ ID NO: 1145
  source 1..101: mol_type = other RNA
  modified_base 1: mod_base = OTHER; note = 2'-O-methyl modified nucleotide with phosphorothioate linkage
  modified_base 2: mod_base = OTHER; note = 2'-O-methyl modified nucleotide with phosphorothioate linkage
  modified_base 3: mod_base = OTHER; note = 2'-O-methyl modified nucleotide with phosphorothioate linkage
  modified_base 4: mod_base = OTHER; note = 2'-O-methyl modified nucleotide
  modified_base 5: mod_base = OTHER; note = 2'-O-methyl modified nucleotide
  modified_base 8: mod_base = OTHER; note = 2'-O-methyl modified nucleotide
  modified_base 9: mod_base = OTHER; note = 2'-O-methyl modified nucleotide
  modified_base 11: mod_base = OTHER; note = 2'-O-methyl modified nucleotide
  modified_base 13: mod_base = OTHER; note = 2'-O-methyl modified nucleotide
  modified_base 18: mod_base = OTHER; note = 2'-O-methyl modified nucleotide
  modified_base 22: mod_base = OTHER; note = 2'-O-methyl modified nucleotide
  modified_base 25: mod_base = OTHER; note = 2'-O-methyl modified nucleotide
  modified_base 29: mod_base = OTHER; note = 2'-O-methyl modified nucleotide
  modified_base 30: mod_base = OTHER; note = 2'-O-methyl modified nucleotide
  modified_base 31: mod_base = OTHER; note = 2'-O-methyl modified nucleotide
  modified_base 32: mod_base = OTHER; note = 2'-O-methyl modified nucleotide
  modified_base 37: mod_base = OTHER; note = 2'-O-methyl modified nucleotide
  modified_base 38: mod_base = OTHER; note = 2'-O-methyl modified nucleotide
  modified_base 39: mod_base = OTHER; note = 2'-O-methyl modified nucleotide
  modified_base 40: mod_base = OTHER; note = 2'-O-methyl modified nucleotide
  modified_base 41: mod_base = OTHER; note = 2'-O-methyl modified nucleotide
  modified_base 42: mod_base = OTHER; note = 2'-O-methyl modified nucleotide
  modified_base 43: mod_base = OTHER; note = 2'-O-methyl modified nucleotide
  modified_base 47: mod_base = OTHER; note = 2'-O-methyl modified nucleotide
  modified_base 48: mod_base = OTHER; note = 2'-O-methyl modified nucleotide
  modified_base 51: mod_base = OTHER; note = 2'-O-methyl modified nucleotide
  modified_base 54: mod_base = OTHER; note = nucleotide with phosphorothioate linkage
  modified_base 58: mod_base = OTHER; note = 2'-O-methyl modified nucleotide
  modified_base 59: mod_base = OTHER; note = 2'-O-methyl modified nucleotide
  modified_base 61: mod_base = OTHER; note = 2'-O-methyl modified nucleotide
  modified_base 62: mod_base = OTHER; note = 2'-O-methyl modified nucleotide
  modified_base 63: mod_base = OTHER; note = 2'-O-methyl modified nucleotide
  modified_base 64: mod_base = OTHER; note = 2'-O-methyl modified nucleotide
  modified_base 65: mod_base = OTHER; note = 2'-O-methyl modified nucleotide
  modified_base 66: mod_base = OTHER; note = 2'-O-methyl modified nucleotide
  modified_base 67: mod_base = OTHER; note = 2'-O-methyl modified nucleotide
  modified_base 68: mod_base = OTHER; note = 2'-O-methyl modified nucleotide
  modified_base 69: mod_base = OTHER; note = 2'-O-methyl modified nucleotide
  modified_base 70: mod_base = OTHER; note = 2'-O-methyl modified nucleotide
  modified_base 75: mod_base = OTHER; note = 2'-O-methyl modified nucleotide
  modified_base 77: mod_base = OTHER; note = 2'-O-methyl modified nucleotide
  modified_base 80: mod_base = OTHER; note = 2'-O-methyl modified nucleotide
  modified_base 86: mod_base = OTHER; note = 2'-O-methyl modified nucleotide
  modified_base 87: mod_base = OTHER; note = 2'-O-methyl modified nucleotide
  modified_base 89: mod_base = OTHER; note = 2'-O-methyl modified nucleotide
  modified_base 90: mod_base = OTHER; note = 2'-O-methyl modified nucleotide
  modified_base 91: mod_base = OTHER; note = 2'-O-methyl modified nucleotide
  modified_base 92: mod_base = OTHER; note = 2'-O-methyl modified nucleotide
  modified_base 99: mod_base = OTHER; note = nucleotide with phosphorothioate linkage
  modified_base 100: mod_base = OTHER; note = 2'-O-methyl modified nucleotide with phosphorothioate linkage
  modified_base 101: mod_base = OTHER; note = 2'-O-methyl modified nucleotide

SEQ ID NO: 2146 - RNA, 101 nt, synthetic construct; identical to SEQ ID NO: 1146
  source 1..101: mol_type = other RNA
  modified_base 1: mod_base = OTHER; note = 2'-O-methyl modified nucleotide with phosphorothioate linkage
  modified_base 2: mod_base = OTHER; note = 2'-O-methyl modified nucleotide with phosphorothioate linkage
  modified_base 3: mod_base = OTHER; note = 2'-O-methyl modified nucleotide with phosphorothioate linkage
  modified_base 4: mod_base = OTHER; note = 2'-O-methyl modified nucleotide
  modified_base 5: mod_base = OTHER; note = 2'-O-methyl modified nucleotide
  modified_base 8: mod_base = OTHER; note = 2'-O-methyl modified nucleotide
  modified_base 9: mod_base = OTHER; note = 2'-O-methyl modified nucleotide
  modified_base 11: mod_base = OTHER; note = 2'-O-methyl modified nucleotide
  modified_base 13: mod_base = OTHER; note = 2'-O-methyl modified nucleotide
  modified_base 18: mod_base = OTHER; note = 2'-O-methyl modified nucleotide
  modified_base 22: mod_base = OTHER; note = 2'-O-methyl modified nucleotide
  modified_base 25: mod_base = OTHER; note = 2'-O-methyl modified nucleotide
  modified_base 29: mod_base = OTHER; note = 2'-O-methyl modified nucleotide
  modified_base 30: mod_base = OTHER; note = 2'-O-methyl modified nucleotide
  modified_base 31: mod_base = OTHER; note = 2'-O-methyl modified nucleotide
  modified_base 32: mod_base = OTHER; note = 2'-O-methyl modified nucleotide
  modified_base 37: mod_base = OTHER; note = 2'-O-methyl modified nucleotide
  modified_base 38: mod_base = OTHER; note = 2'-O-methyl modified nucleotide
  modified_base 39: mod_base = OTHER; note = 2'-O-methyl modified nucleotide
  modified_base 40: mod_base = OTHER; note = 2'-O-methyl modified nucleotide
  modified_base 41: mod_base = OTHER; note = 2'-O-methyl modified nucleotide
  modified_base 42: mod_base = OTHER; note = 2'-O-methyl modified nucleotide
  modified_base 43: mod_base = OTHER; note = 2'-O-methyl modified nucleotide
  modified_base 47: mod_base = OTHER; note = 2'-O-methyl modified nucleotide
  modified_base 48: mod_base = OTHER; note = 2'-O-methyl modified nucleotide
  modified_base 51: mod_base = OTHER; note = 2'-O-methyl modified nucleotide
  modified_base 54: mod_base = OTHER; note = nucleotide with phosphorothioate linkage
  modified_base 58: mod_base = OTHER; note = 2'-O-methyl modified nucleotide
  modified_base 59: mod_base = OTHER; note = 2'-O-methyl modified nucleotide
  modified_base 61: mod_base = OTHER; note = 2'-O-methyl modified nucleotide
  modified_base 62: mod_base = OTHER; note = 2'-O-methyl modified nucleotide
  modified_base 63: mod_base = OTHER; note = 2'-O-methyl modified nucleotide
  modified_base 64: mod_base = OTHER; note = 2'-O-methyl modified nucleotide
  modified_base 65: mod_base = OTHER; note = 2'-O-methyl modified nucleotide
  modified_base 66: mod_base = OTHER; note = 2'-O-methyl modified nucleotide
  modified_base 67: mod_base = OTHER; note = 2'-O-methyl modified nucleotide
  modified_base 68: mod_base = OTHER; note = 2'-O-methyl modified nucleotide
  modified_base 69: mod_base = OTHER; note = 2'-O-methyl modified nucleotide
  modified_base 70: mod_base = OTHER; note = 2'-O-methyl modified nucleotide
  modified_base 75: mod_base = OTHER; note = 2'-O-methyl modified nucleotide
  modified_base 77: mod_base = OTHER; note = 2'-O-methyl modified nucleotide
  modified_base 80: mod_base = OTHER; note = 2'-O-methyl modified nucleotide
  modified_base 86: mod_base = OTHER; note = 2'-O-methyl modified nucleotide
  modified_base 87: mod_base = OTHER; note = 2'-O-methyl modified nucleotide
  modified_base 89: mod_base = OTHER; note = 2'-O-methyl modified nucleotide
  modified_base 90: mod_base = OTHER; note = 2'-O-methyl modified nucleotide
  modified_base 91: mod_base = OTHER; note = 2'-O-methyl modified nucleotide
  modified_base 92: mod_base = OTHER; note = 2'-O-methyl modified nucleotide
  modified_base 99: mod_base = OTHER; note = nucleotide with phosphorothioate linkage
  modified_base 100: mod_base = OTHER; note = 2'-O-methyl modified nucleotide with phosphorothioate linkage
  modified_base 101: mod_base = OTHER; note = 2'-O-methyl modified nucleotide

SEQ ID NO: 2147 - RNA, 101 nt, synthetic construct; identical to SEQ ID NO: 1147
  source 1..101: mol_type = other RNA
  modified_base 1: mod_base = OTHER; note = 2'-O-methyl modified nucleotide with phosphorothioate linkage
  modified_base 2: mod_base = OTHER; note = 2'-O-methyl modified nucleotide with phosphorothioate linkage
  modified_base 3: mod_base = OTHER; note = 2'-O-methyl modified nucleotide with phosphorothioate linkage
  modified_base 4: mod_base = OTHER; note = 2'-O-methyl modified nucleotide
  modified_base 5: mod_base = OTHER; note = 2'-O-methyl modified nucleotide
  modified_base 8: mod_base = OTHER; note = 2'-O-methyl modified nucleotide
  modified_base 9: mod_base = OTHER; note = 2'-O-methyl modified nucleotide
  modified_base 11: mod_base = OTHER; note = 2'-O-methyl modified nucleotide
  modified_base 13: mod_base = OTHER; note = 2'-O-methyl modified nucleotide
  modified_base 18: mod_base = OTHER; note = 2'-O-methyl modified nucleotide
  modified_base 22: mod_base = OTHER; note = 2'-O-methyl modified nucleotide
  modified_base 25: mod_base = OTHER; note = 2'-O-methyl modified nucleotide
  modified_base 29: mod_base = OTHER; note = 2'-O-methyl modified nucleotide
  modified_base 30: mod_base = OTHER; note = 2'-O-methyl modified nucleotide
  modified_base 31: mod_base = OTHER; note = 2'-O-methyl modified nucleotide
  modified_base 32: mod_base = OTHER; note = 2'-O-methyl modified nucleotide
  modified_base 37: mod_base = OTHER; note = 2'-O-methyl modified nucleotide
  modified_base 38: mod_base = OTHER; note = 2'-O-methyl modified nucleotide
  modified_base 39: mod_base = OTHER; note = 2'-O-methyl modified nucleotide
  modified_base 40: mod_base = OTHER; note = 2'-O-methyl modified nucleotide
  modified_base 41: mod_base = OTHER; note = 2'-O-methyl modified nucleotide
  modified_base 42: mod_base = OTHER; note = 2'-O-methyl modified nucleotide
  modified_base 43: mod_base = OTHER; note = 2'-O-methyl modified nucleotide
  modified_base 47: mod_base = OTHER; note = 2'-O-methyl modified nucleotide
  modified_base 48: mod_base = OTHER; note = 2'-O-methyl modified nucleotide
  modified_base 51: mod_base = OTHER; note = 2'-O-methyl modified nucleotide
  modified_base 54: mod_base = OTHER; note = nucleotide with phosphorothioate linkage
  modified_base 58: mod_base = OTHER; note = 2'-O-methyl modified nucleotide
  modified_base 59: mod_base = OTHER; note = 2'-O-methyl modified nucleotide
  modified_base 61: mod_base = OTHER; note = 2'-O-methyl modified nucleotide
  modified_base 62: mod_base = OTHER; note = 2'-O-methyl modified nucleotide
  modified_base 63: mod_base = OTHER; note = 2'-O-methyl modified nucleotide
  modified_base 64: mod_base = OTHER; note = 2'-O-methyl modified nucleotide
  modified_base 65: mod_base = OTHER; note = 2'-O-methyl modified nucleotide
  modified_base 66: mod_base = OTHER; note = 2'-O-methyl modified nucleotide
  modified_base 67: mod_base = OTHER; note = 2'-O-methyl modified nucleotide
  modified_base 68: mod_base = OTHER; note = 2'-O-methyl modified nucleotide
  modified_base 69: mod_base = OTHER; note = 2'-O-methyl modified nucleotide
  modified_base 70: mod_base = OTHER; note = 2'-O-methyl modified nucleotide
  modified_base 75: mod_base = OTHER; note = 2'-O-methyl modified nucleotide
  modified_base 77: mod_base = OTHER; note = 2'-O-methyl modified nucleotide
  modified_base 80: mod_base = OTHER; note = 2'-O-methyl modified nucleotide
  modified_base 86: mod_base = OTHER; note = 2'-O-methyl modified nucleotide
  modified_base 87: mod_base = OTHER; note = 2'-O-methyl modified nucleotide
  modified_base 89: mod_base = OTHER; note = 2'-O-methyl modified nucleotide
  modified_base 90: mod_base = OTHER; note = 2'-O-methyl modified nucleotide
  modified_base 91: mod_base = OTHER; note = 2'-O-methyl modified nucleotide
  modified_base 92: mod_base = OTHER; note = 2'-O-methyl modified nucleotide
  modified_base 99: mod_base = OTHER; note = nucleotide with phosphorothioate linkage
  modified_base 100: mod_base = OTHER; note = 2'-O-methyl modified nucleotide with phosphorothioate linkage
  modified_base 101: mod_base = OTHER; note = 2'-O-methyl modified nucleotide

SEQ ID NO: 2148 - RNA, 101 nt, synthetic construct; identical to SEQ ID NO: 1148
  source 1..101: mol_type = other RNA
  modified_base 1: mod_base = OTHER; note = 2'-O-methyl modified nucleotide with phosphorothioate linkage
  modified_base 2: mod_base = OTHER; note = 2'-O-methyl modified nucleotide with phosphorothioate linkage
  modified_base 3: mod_base = OTHER; note = 2'-O-methyl modified nucleotide with phosphorothioate linkage
  modified_base 4: mod_base = OTHER; note = 2'-O-methyl modified nucleotide
  modified_base 5: mod_base = OTHER; note = 2'-O-methyl modified nucleotide
  modified_base 8: mod_base = OTHER; note = 2'-O-methyl modified nucleotide
  modified_base 9: mod_base = OTHER; note = 2'-O-methyl modified nucleotide
  modified_base 11: mod_base = OTHER; note = 2'-O-methyl modified nucleotide
  modified_base 13: mod_base = OTHER; note = 2'-O-methyl modified nucleotide
  modified_base 18: mod_base = OTHER; note = 2'-O-methyl modified nucleotide
  modified_base 22: mod_base = OTHER; note = 2'-O-methyl modified nucleotide
  modified_base 25: mod_base = OTHER; note = 2'-O-methyl modified nucleotide
  modified_base 29: mod_base = OTHER; note = 2'-O-methyl modified nucleotide
  modified_base 30: mod_base = OTHER; note = 2'-O-methyl modified nucleotide
  modified_base 31: mod_base = OTHER; note = 2'-O-methyl modified nucleotide
  modified_base 32: mod_base = OTHER; note = 2'-O-methyl modified nucleotide
  modified_base 37: mod_base = OTHER; note = 2'-O-methyl modified nucleotide
  modified_base 38: mod_base = OTHER; note = 2'-O-methyl modified nucleotide
  modified_base 39: mod_base = OTHER; note = 2'-O-methyl modified nucleotide
  modified_base 40: mod_base = OTHER; note = 2'-O-methyl modified nucleotide
  modified_base 41: mod_base = OTHER; note = 2'-O-methyl modified nucleotide
  modified_base 42: mod_base = OTHER; note = 2'-O-methyl modified nucleotide
  modified_base 43: mod_base = OTHER; note = 2'-O-methyl modified nucleotide
  modified_base 47: mod_base = OTHER; note = 2'-O-methyl modified nucleotide
  modified_base 48: mod_base = OTHER; note = 2'-O-methyl modified nucleotide
  modified_base 51: mod_base = OTHER; note = 2'-O-methyl modified nucleotide
  modified_base 54: mod_base = OTHER; note = nucleotide with phosphorothioate linkage
  modified_base 58: mod_base = OTHER; note = 2'-O-methyl modified nucleotide
  modified_base 59: mod_base = OTHER; note = 2'-O-methyl modified nucleotide
  modified_base 61: mod_base = OTHER; note = 2'-O-methyl modified nucleotide
  modified_base 62: mod_base = OTHER; note = 2'-O-methyl modified nucleotide
  modified_base 63: mod_base = OTHER; note = 2'-O-methyl modified nucleotide
  modified_base 64: mod_base = OTHER; note = 2'-O-methyl modified nucleotide
  modified_base 65: mod_base = OTHER; note = 2'-O-methyl modified nucleotide
  modified_base 66: mod_base = OTHER; note = 2'-O-methyl modified nucleotide
  modified_base 67: mod_base = OTHER; note = 2'-O-methyl modified nucleotide
  modified_base 68: mod_base = OTHER; note = 2'-O-methyl modified nucleotide
  modified_base 69: mod_base = OTHER; note = 2'-O-methyl modified nucleotide
  modified_base 70: mod_base = OTHER; note = 2'-O-methyl modified nucleotide
  modified_base 75: mod_base = OTHER; note = 2'-O-methyl modified nucleotide
  modified_base 77: mod_base = OTHER; note = 2'-O-methyl modified nucleotide
  modified_base 80: mod_base = OTHER; note = 2'-O-methyl modified nucleotide
  modified_base 86: mod_base = OTHER; note = 2'-O-methyl modified nucleotide
  modified_base 87: mod_base = OTHER; note = 2'-O-methyl modified nucleotide
  modified_base 89: mod_base = OTHER; note = 2'-O-methyl modified nucleotide
  modified_base 90: mod_base = OTHER; note = 2'-O-methyl modified nucleotide
  modified_base 91: mod_base = OTHER; note = 2'-O-methyl modified nucleotide
  modified_base 92: mod_base = OTHER; note = 2'-O-methyl modified nucleotide
  modified_base 99: mod_base = OTHER; note = nucleotide with phosphorothioate linkage
  modified_base 100: mod_base = OTHER; note = 2'-O-methyl modified nucleotide with phosphorothioate linkage
  modified_base 101: mod_base = OTHER; note = 2'-O-methyl modified nucleotide

SEQ ID NO: 2149 - RNA, 101 nt, synthetic construct; identical to SEQ ID NO: 1149
  source 1..101: mol_type = other RNA
  modified_base 1: mod_base = OTHER; note = 2'-O-methyl modified nucleotide with phosphorothioate linkage
  modified_base 2: mod_base = OTHER; note = 2'-O-methyl modified nucleotide with phosphorothioate linkage
  modified_base 3: mod_base = OTHER; note = 2'-O-methyl modified nucleotide with phosphorothioate linkage
  modified_base 4: mod_base = OTHER; note = 2'-O-methyl modified nucleotide
  modified_base 5: mod_base = OTHER; note = 2'-O-methyl modified nucleotide
  modified_base 8: mod_base = OTHER; note = 2'-O-methyl modified nucleotide
  modified_base 9: mod_base = OTHER; note = 2'-O-methyl modified nucleotide
  modified_base 11: mod_base = OTHER; note = 2'-O-methyl modified nucleotide
  modified_base 13: mod_base = OTHER; note = 2'-O-methyl modified nucleotide
  modified_base 18: mod_base = OTHER; note = 2'-O-methyl modified nucleotide
  modified_base 22: mod_base = OTHER; note = 2'-O-methyl modified nucleotide
  modified_base 25: mod_base = OTHER; note = 2'-O-methyl modified nucleotide
  modified_base 29: mod_base = OTHER; note = 2'-O-methyl modified nucleotide
  modified_base 30: mod_base = OTHER; note = 2'-O-methyl modified nucleotide
  modified_base 31: mod_base = OTHER; note = 2'-O-methyl modified nucleotide
  modified_base 32: mod_base = OTHER; note = 2'-O-methyl modified nucleotide
  modified_base 37: mod_base = OTHER; note = 2'-O-methyl modified nucleotide
  modified_base 38: mod_base = OTHER; note = 2'-O-methyl modified nucleotide
  modified_base 39: mod_base = OTHER; note = 2'-O-methyl modified nucleotide
  modified_base 40: mod_base = OTHER; note = 2'-O-methyl modified nucleotide
  modified_base 41: mod_base = OTHER; note = 2'-O-methyl modified nucleotide
  modified_base 42: mod_base = OTHER; note = 2'-O-methyl modified nucleotide
  modified_base 43: mod_base = OTHER; note = 2'-O-methyl modified nucleotide
  modified_base 47: mod_base = OTHER; note = 2'-O-methyl modified nucleotide
  modified_base 48: mod_base = OTHER; note = 2'-O-methyl modified nucleotide
  modified_base 51: mod_base = OTHER; note = 2'-O-methyl modified nucleotide
  modified_base 54: mod_base = OTHER; note = nucleotide with phosphorothioate linkage
  modified_base 58: mod_base = OTHER; note = 2'-O-methyl modified nucleotide
  modified_base 59: mod_base = OTHER; note = 2'-O-methyl modified nucleotide
  modified_base 61: mod_base = OTHER; note = 2'-O-methyl modified nucleotide
  modified_base 62: mod_base = OTHER; note = 2'-O-methyl modified nucleotide
  modified_base 63: mod_base = OTHER; note = 2'-O-methyl modified nucleotide
  modified_base 64: mod_base = OTHER; note = 2'-O-methyl modified nucleotide
  modified_base 65: mod_base = OTHER; note = 2'-O-methyl modified nucleotide
  modified_base 66: mod_base = OTHER; note = 2'-O-methyl modified nucleotide
  modified_base 67: mod_base = OTHER; note = 2'-O-methyl modified nucleotide
  modified_base 68: mod_base = OTHER; note = 2'-O-methyl modified nucleotide
  modified_base 69: mod_base = OTHER; note = 2'-O-methyl modified nucleotide
  modified_base 70: mod_base = OTHER; note = 2'-O-methyl modified nucleotide
  modified_base 75: mod_base = OTHER; note = 2'-O-methyl modified nucleotide
  modified_base 77: mod_base = OTHER; note = 2'-O-methyl modified nucleotide
  modified_base 80: mod_base = OTHER; note = 2'-O-methyl modified nucleotide
  modified_base 86: mod_base = OTHER; note = 2'-O-methyl modified nucleotide
  modified_base 87: mod_base = OTHER; note = 2'-O-methyl modified nucleotide
  modified_base 89: mod_base = OTHER; note = 2'-O-methyl modified nucleotide
  modified_base 90: mod_base = OTHER; note = 2'-O-methyl modified nucleotide
  modified_base 91: mod_base = OTHER; note = 2'-O-methyl modified nucleotide
  modified_base 92: mod_base = OTHER; note = 2'-O-methyl modified nucleotide
  modified_base 99: mod_base = OTHER; note = nucleotide with phosphorothioate linkage
  modified_base 100: mod_base = OTHER; note = 2'-O-methyl modified nucleotide with phosphorothioate linkage
  modified_base 101: mod_base = OTHER; note = 2'-O-methyl modified nucleotide

SEQ ID NO: 2150 - RNA, 101 nt, synthetic construct; identical to SEQ ID NO: 1150
  source 1..101: mol_type = other RNA
  modified_base 1: mod_base = OTHER; note = 2'-O-methyl modified nucleotide with phosphorothioate linkage
  modified_base 2: mod_base = OTHER; note = 2'-O-methyl modified nucleotide with phosphorothioate linkage
  modified_base 3: mod_base = OTHER; note = 2'-O-methyl modified nucleotide with phosphorothioate linkage
  modified_base 4: mod_base = OTHER; note = 2'-O-methyl modified nucleotide
  modified_base 5: mod_base = OTHER; note = 2'-O-methyl modified nucleotide
  modified_base 8: mod_base = OTHER; note = 2'-O-methyl modified nucleotide
  modified_base 9: mod_base = OTHER; note = 2'-O-methyl modified nucleotide
  modified_base 11: mod_base = OTHER; note = 2'-O-methyl modified nucleotide
  modified_base 13: mod_base = OTHER; note = 2'-O-methyl modified nucleotide
  modified_base 18: mod_base = OTHER; note = 2'-O-methyl modified nucleotide
  modified_base 22: mod_base = OTHER; note = 2'-O-methyl modified nucleotide
  modified_base 25: mod_base = OTHER; note = 2'-O-methyl modified nucleotide
  modified_base 29: mod_base = OTHER; note = 2'-O-methyl modified nucleotide
  modified_base 30: mod_base = OTHER; note = 2'-O-methyl modified nucleotide
  modified_base 31: mod_base = OTHER; note = 2'-O-methyl modified nucleotide
  modified_base 32: mod_base = OTHER; note = 2'-O-methyl modified nucleotide
  modified_base 37: mod_base = OTHER; note = 2'-O-methyl modified nucleotide
  modified_base 38: mod_base = OTHER; note = 2'-O-methyl modified nucleotide
  modified_base 39: mod_base = OTHER; note = 2'-O-methyl modified nucleotide
  modified_base 40: mod_base = OTHER; note = 2'-O-methyl modified nucleotide
  modified_base 41: mod_base = OTHER; note = 2'-O-methyl modified nucleotide
  modified_base 42: mod_base = OTHER; note = 2'-O-methyl modified nucleotide
  modified_base 43: mod_base = OTHER; note = 2'-O-methyl modified nucleotide
  modified_base 47: mod_base = OTHER; note = 2'-O-methyl modified nucleotide
  modified_base 48: mod_base = OTHER; note = 2'-O-methyl modified nucleotide
  modified_base 51: mod_base = OTHER; note = 2'-O-methyl modified nucleotide
  modified_base 54: mod_base = OTHER; note = nucleotide with phosphorothioate linkage
  modified_base 58: mod_base = OTHER; note = 2'-O-methyl modified nucleotide
  modified_base 59: mod_base = OTHER; note = 2'-O-methyl modified nucleotide
  modified_base 61: mod_base = OTHER; note = 2'-O-methyl modified nucleotide
  modified_base 62: mod_base = OTHER; note = 2'-O-methyl modified nucleotide
  modified_base 63: mod_base = OTHER; note = 2'-O-methyl modified nucleotide
  modified_base 64: mod_base = OTHER; note = 2'-O-methyl modified nucleotide
  modified_base 65: mod_base = OTHER; note = 2'-O-methyl modified nucleotide
  modified_base 66: mod_base = OTHER; note = 2'-O-methyl modified nucleotide
  modified_base 67: mod_base = OTHER; note = 2'-O-methyl modified nucleotide
  modified_base 68: mod_base = OTHER; note = 2'-O-methyl modified nucleotide
  modified_base 69: mod_base = OTHER; note = 2'-O-methyl modified nucleotide
  modified_base 70: mod_base = OTHER; note = 2'-O-methyl modified nucleotide
  modified_base 75: mod_base = OTHER; note = 2'-O-methyl modified nucleotide
  modified_base 77: mod_base = OTHER; note = 2'-O-methyl modified nucleotide
  modified_base 80: mod_base = OTHER; note = 2'-O-methyl modified nucleotide
  modified_base 86: mod_base = OTHER; note = 2'-O-methyl modified nucleotide
  modified_base 87: mod_base = OTHER; note = 2'-O-methyl modified nucleotide
  modified_base 89: mod_base = OTHER; note = 2'-O-methyl modified nucleotide
  modified_base 90: mod_base = OTHER; note = 2'-O-methyl modified nucleotide
  modified_base 91: mod_base = OTHER; note = 2'-O-methyl modified nucleotide
  modified_base 92: mod_base = OTHER; note = 2'-O-methyl modified nucleotide
  modified_base 99: mod_base = OTHER; note = nucleotide with phosphorothioate linkage
  modified_base 100: mod_base = OTHER; note = 2'-O-methyl modified nucleotide with phosphorothioate linkage
  modified_base 101: mod_base = OTHER; note = 2'-O-methyl modified nucleotide

SEQ ID NO: 2151 - RNA, 101 nt, synthetic construct; identical to SEQ ID NO: 1151
  source 1..101: mol_type = other RNA
  modified_base 1: mod_base = OTHER; note = 2'-O-methyl modified nucleotide with phosphorothioate linkage
  modified_base 2: mod_base = OTHER; note = 2'-O-methyl modified nucleotide with phosphorothioate linkage
  modified_base 3: mod_base = OTHER; note = 2'-O-methyl modified nucleotide with phosphorothioate linkage
  modified_base 4: mod_base = OTHER; note = 2'-O-methyl modified nucleotide
  modified_base 5: mod_base = OTHER; note = 2'-O-methyl modified nucleotide
  modified_base 8: mod_base = OTHER; note = 2'-O-methyl modified nucleotide
  modified_base 9: mod_base = OTHER; note = 2'-O-methyl modified nucleotide
  modified_base 11: mod_base = OTHER; note = 2'-O-methyl modified nucleotide
  modified_base 13: mod_base = OTHER; note = 2'-O-methyl modified nucleotide
  modified_base 18: mod_base = OTHER; note = 2'-O-methyl modified nucleotide
  modified_base 22: mod_base = OTHER; note = 2'-O-methyl modified nucleotide
  modified_base 25: mod_base = OTHER; note = 2'-O-methyl modified nucleotide
  modified_base 29: mod_base = OTHER; note = 2'-O-methyl modified nucleotide
  modified_base 30: mod_base = OTHER; note = 2'-O-methyl modified nucleotide
  modified_base 31: mod_base = OTHER; note = 2'-O-methyl modified nucleotide
  modified_base 32: mod_base = OTHER; note = 2'-O-methyl modified nucleotide
  modified_base 37: mod_base = OTHER; note = 2'-O-methyl modified nucleotide
  modified_base 38: mod_base = OTHER; note = 2'-O-methyl modified nucleotide
  modified_base 39: mod_base = OTHER; note = 2'-O-methyl modified nucleotide
  modified_base 40: mod_base = OTHER; note = 2'-O-methyl modified nucleotide
  modified_base 41: mod_base = OTHER; note = 2'-O-methyl modified nucleotide
  modified_base 42: mod_base = OTHER; note = 2'-O-methyl modified nucleotide
  modified_base 43: mod_base = OTHER; note = 2'-O-methyl modified nucleotide
  modified_base 47: mod_base = OTHER; note = 2'-O-methyl modified nucleotide
  modified_base 48: mod_base = OTHER; note = 2'-O-methyl modified nucleotide
  modified_base 51: mod_base = OTHER; note = 2'-O-methyl modified nucleotide
  modified_base 54: mod_base = OTHER; note = nucleotide with phosphorothioate linkage
  modified_base 58: mod_base = OTHER; note = 2'-O-methyl modified nucleotide
  modified_base 59: mod_base = OTHER; note = 2'-O-methyl modified nucleotide
  modified_base 61: mod_base = OTHER; note = 2'-O-methyl modified nucleotide
  modified_base 62: mod_base = OTHER; note = 2'-O-methyl modified nucleotide
  modified_base 63: mod_base = OTHER; note = 2'-O-methyl modified nucleotide
  modified_base 64: mod_base = OTHER; note = 2'-O-methyl modified nucleotide
  modified_base 65: mod_base = OTHER; note = 2'-O-methyl modified nucleotide
  modified_base 66: mod_base = OTHER; note = 2'-O-methyl modified nucleotide
  modified_base 67: mod_base = OTHER; note = 2'-O-methyl modified nucleotide
  modified_base 68: mod_base = OTHER; note = 2'-O-methyl modified nucleotide
  modified_base 69: mod_base = OTHER; note = 2'-O-methyl modified nucleotide
  modified_base 70: mod_base = OTHER; note = 2'-O-methyl modified nucleotide
  modified_base 75: mod_base = OTHER; note = 2'-O-methyl modified nucleotide
  modified_base 77: mod_base = OTHER; note = 2'-O-methyl modified nucleotide
  modified_base 80: mod_base = OTHER; note = 2'-O-methyl modified nucleotide
  modified_base 86: mod_base = OTHER; note = 2'-O-methyl modified nucleotide
  modified_base 87: mod_base = OTHER; note = 2'-O-methyl modified nucleotide
  modified_base 89: mod_base = OTHER; note = 2'-O-methyl modified nucleotide
  modified_base 90: mod_base = OTHER; note = 2'-O-methyl modified nucleotide
  modified_base 91: mod_base = OTHER; note = 2'-O-methyl modified nucleotide
  modified_base 92: mod_base = OTHER; note = 2'-O-methyl modified nucleotide
  modified_base 99: mod_base = OTHER; note = nucleotide with phosphorothioate linkage
  modified_base 100: mod_base = OTHER; note = 2'-O-methyl modified nucleotide with phosphorothioate linkage
  modified_base 101: mod_base = OTHER; note = 2'-O-methyl modified nucleotide

SEQ ID NO: 2152 - RNA, 101 nt, synthetic construct; identical to SEQ ID NO: 1152
  source 1..101: mol_type = other RNA
  modified_base 1: mod_base = OTHER; note = 2'-O-methyl modified nucleotide with phosphorothioate linkage
  modified_base 2: mod_base = OTHER; note = 2'-O-methyl modified nucleotide with phosphorothioate linkage
  modified_base 3: mod_base = OTHER; note = 2'-O-methyl modified nucleotide with phosphorothioate linkage
  modified_base 4: mod_base = OTHER; note = 2'-O-methyl modified nucleotide
  modified_base 5: mod_base = OTHER; note = 2'-O-methyl modified nucleotide
  modified_base 8: mod_base = OTHER; note = 2'-O-methyl modified nucleotide
  modified_base 9: mod_base = OTHER; note = 2'-O-methyl modified nucleotide
  modified_base 11: mod_base = OTHER; note = 2'-O-methyl modified nucleotide
  modified_base 13: mod_base = OTHER; note = 2'-O-methyl modified nucleotide
  modified_base 18: mod_base = OTHER; note = 2'-O-methyl modified nucleotide
  modified_base 22: mod_base = OTHER; note = 2'-O-methyl modified nucleotide
  modified_base 25: mod_base = OTHER; note = 2'-O-methyl modified nucleotide
  modified_base 29: mod_base = OTHER; note = 2'-O-methyl modified nucleotide
  modified_base 30: mod_base = OTHER; note = 2'-O-methyl modified nucleotide
  modified_base 31: mod_base = OTHER; note = 2'-O-methyl modified nucleotide
  modified_base 32: mod_base = OTHER; note = 2'-O-methyl modified nucleotide
  modified_base 37: mod_base = OTHER; note = 2'-O-methyl modified nucleotide
  modified_base 38: mod_base = OTHER; note = 2'-O-methyl modified nucleotide
  modified_base 39: mod_base = OTHER; note = 2'-O-methyl modified nucleotide
  modified_base 40: mod_base = OTHER; note = 2'-O-methyl modified nucleotide
  modified_base 41: mod_base = OTHER; note = 2'-O-methyl modified nucleotide
  modified_base 42: mod_base = OTHER; note = 2'-O-methyl modified nucleotide
  modified_base 43: mod_base = OTHER; note = 2'-O-methyl modified nucleotide
  modified_base 47: mod_base = OTHER; note = 2'-O-methyl modified nucleotide
  modified_base 48: mod_base = OTHER; note = 2'-O-methyl modified nucleotide
  modified_base 51: mod_base = OTHER; note = 2'-O-methyl modified nucleotide
  modified_base 54: mod_base = OTHER; note = nucleotide with phosphorothioate linkage
  modified_base 58: mod_base = OTHER; note = 2'-O-methyl modified nucleotide
  modified_base 59: mod_base = OTHER; note = 2'-O-methyl modified nucleotide
  modified_base 61: mod_base = OTHER; note = 2'-O-methyl modified nucleotide
  modified_base 62: mod_base = OTHER; note = 2'-O-methyl modified nucleotide
  modified_base 63: mod_base = OTHER; note = 2'-O-methyl modified nucleotide
  modified_base 64: mod_base = OTHER; note = 2'-O-methyl modified nucleotide
  modified_base 65: mod_base = OTHER; note = 2'-O-methyl modified nucleotide
  modified_base 66: mod_base = OTHER; note = 2'-O-methyl modified nucleotide
  modified_base 67: mod_base = OTHER; note = 2'-O-methyl modified nucleotide
  modified_base 68: mod_base = OTHER; note = 2'-O-methyl modified nucleotide
  modified_base 69: mod_base = OTHER; note = 2'-O-methyl modified nucleotide
  modified_base 70: mod_base = OTHER; note = 2'-O-methyl modified nucleotide
  modified_base 75: mod_base = OTHER; note = 2'-O-methyl modified nucleotide
  modified_base 77: mod_base = OTHER; note = 2'-O-methyl modified nucleotide
  modified_base 80: mod_base = OTHER; note = 2'-O-methyl modified nucleotide
  modified_base 86: mod_base = OTHER; note = 2'-O-methyl modified nucleotide
  modified_base 87: mod_base = OTHER; note = 2'-O-methyl modified nucleotide
  modified_base 89: mod_base = OTHER; note = 2'-O-methyl modified nucleotide
  modified_base 90: mod_base = OTHER; note = 2'-O-methyl modified nucleotide
  modified_base 91: mod_base = OTHER; note = 2'-O-methyl modified nucleotide
  modified_base 92: mod_base = OTHER; note = 2'-O-methyl modified nucleotide
  modified_base 99: mod_base = OTHER; note = nucleotide with phosphorothioate linkage
  modified_base 100: mod_base = OTHER; note = 2'-O-methyl modified nucleotide with phosphorothioate linkage
  modified_base 101: mod_base = OTHER; note = 2'-O-methyl modified nucleotide

SEQ ID NO: 2153 - RNA, 101 nt, synthetic construct; identical to SEQ ID NO: 1153
  source 1..101: mol_type = other RNA
  modified_base 1: mod_base = OTHER; note = 2'-O-methyl modified nucleotide with phosphorothioate linkage
  modified_base 2: mod_base = OTHER; note = 2'-O-methyl modified nucleotide with phosphorothioate linkage
  modified_base 3: mod_base = OTHER; note = 2'-O-methyl modified nucleotide with phosphorothioate linkage
  modified_base 4: mod_base = OTHER; note = 2'-O-methyl modified nucleotide
  modified_base 5: mod_base = OTHER; note = 2'-O-methyl modified nucleotide
  modified_base 8: mod_base = OTHER; note = 2'-O-methyl modified nucleotide
  modified_base 9: mod_base = OTHER; note = 2'-O-methyl modified nucleotide
  modified_base 11: mod_base = OTHER; note = 2'-O-methyl modified nucleotide
  modified_base 13: mod_base = OTHER; note = 2'-O-methyl modified nucleotide
  modified_base 18: mod_base = OTHER; note = 2'-O-methyl modified nucleotide
  modified_base 22: mod_base = OTHER; note = 2'-O-methyl modified nucleotide
  modified_base 25: mod_base = OTHER; note = 2'-O-methyl modified nucleotide
  modified_base 29: mod_base = OTHER; note = 2'-O-methyl modified nucleotide
  modified_base 30: mod_base = OTHER; note = 2'-O-methyl modified nucleotide
  modified_base 31: mod_base = OTHER; note = 2'-O-methyl modified nucleotide
  modified_base 32: mod_base = OTHER; note = 2'-O-methyl modified nucleotide
  modified_base 37: mod_base = OTHER; note = 2'-O-methyl modified nucleotide
  modified_base 38: mod_base = OTHER; note = 2'-O-methyl modified nucleotide
  modified_base 39: mod_base = OTHER; note = 2'-O-methyl modified nucleotide
  modified_base 40: mod_base = OTHER; note = 2'-O-methyl modified nucleotide
  modified_base 41: mod_base = OTHER; note = 2'-O-methyl modified nucleotide
  modified_base 42: mod_base = OTHER; note = 2'-O-methyl modified nucleotide
  modified_base 43: mod_base = OTHER; note = 2'-O-methyl modified nucleotide
  modified_base 47: mod_base = OTHER; note = 2'-O-methyl modified nucleotide
  modified_base 48: mod_base = OTHER; note = 2'-O-methyl modified nucleotide
  modified_base 51: mod_base = OTHER; note = 2'-O-methyl modified nucleotide
  modified_base 54: mod_base = OTHER; note = nucleotide with phosphorothioate linkage
  modified_base 58: mod_base = OTHER; note = 2'-O-methyl modified nucleotide
  modified_base 59: mod_base = OTHER; note = 2'-O-methyl modified nucleotide
  modified_base 61: mod_base = OTHER; note = 2'-O-methyl modified nucleotide
  modified_base 62: mod_base = OTHER; note = 2'-O-methyl modified nucleotide
  modified_base 63: mod_base = OTHER; note = 2'-O-methyl modified nucleotide
  modified_base 64: mod_base = OTHER; note = 2'-O-methyl modified nucleotide
  modified_base 65: mod_base = OTHER; note = 2'-O-methyl modified nucleotide
  modified_base 66: mod_base = OTHER; note = 2'-O-methyl modified nucleotide
  modified_base 67: mod_base = OTHER; note = 2'-O-methyl modified nucleotide
  modified_base 68: mod_base = OTHER; note = 2'-O-methyl modified nucleotide
  modified_base 69: mod_base = OTHER; note = 2'-O-methyl modified nucleotide
  modified_base 70: mod_base = OTHER; note = 2'-O-methyl modified nucleotide
  modified_base 75: mod_base = OTHER; note = 2'-O-methyl modified nucleotide
  modified_base 77: mod_base = OTHER; note = 2'-O-methyl modified nucleotide
  modified_base 80: mod_base = OTHER; note = 2'-O-methyl modified nucleotide
  modified_base 86: mod_base = OTHER; note = 2'-O-methyl modified nucleotide
  modified_base 87: mod_base = OTHER; note = 2'-O-methyl modified nucleotide
  modified_base 89: mod_base = OTHER; note = 2'-O-methyl modified nucleotide
  modified_base 90: mod_base = OTHER; note = 2'-O-methyl modified nucleotide
  modified_base 91: mod_base = OTHER; note = 2'-O-methyl modified nucleotide
  modified_base 92: mod_base = OTHER; note = 2'-O-methyl modified nucleotide
  modified_base 99: mod_base = OTHER; note = nucleotide with phosphorothioate linkage
  modified_base 100: mod_base = OTHER; note = 2'-O-methyl modified nucleotide with phosphorothioate linkage
  modified_base 101: mod_base = OTHER; note = 2'-O-methyl modified nucleotide

SEQ ID NO: 2154 - RNA, 101 nt, synthetic construct; identical to SEQ ID NO: 1154
  source 1..101: mol_type = other RNA
  modified_base 1: mod_base = OTHER; note = 2'-O-methyl modified nucleotide with phosphorothioate linkage
  modified_base 2: mod_base = OTHER; note = 2'-O-methyl modified nucleotide with phosphorothioate linkage
  modified_base 3: mod_base = OTHER; note = 2'-O-methyl modified nucleotide with phosphorothioate linkage
  modified_base 4: mod_base = OTHER; note = 2'-O-methyl modified nucleotide
  modified_base 5: mod_base = OTHER; note = 2'-O-methyl modified nucleotide
  modified_base 8: mod_base = OTHER; note = 2'-O-methyl modified nucleotide
  modified_base 9: mod_base = OTHER; note = 2'-O-methyl modified nucleotide
  modified_base 11: mod_base = OTHER; note = 2'-O-methyl modified nucleotide
  modified_base 13: mod_base = OTHER; note = 2'-O-methyl modified nucleotide
  modified_base 18: mod_base = OTHER; note = 2'-O-methyl modified nucleotide
  modified_base 22: mod_base = OTHER; note = 2'-O-methyl modified nucleotide
  modified_base 25: mod_base = OTHER; note = 2'-O-methyl modified nucleotide
  modified_base 29: mod_base = OTHER; note = 2'-O-methyl modified nucleotide
  modified_base 30: mod_base = OTHER; note = 2'-O-methyl modified nucleotide
  modified_base 31: mod_base = OTHER; note = 2'-O-methyl modified nucleotide
  modified_base 32: mod_base = OTHER; note = 2'-O-methyl modified nucleotide
  modified_base 37: mod_base = OTHER; note = 2'-O-methyl modified nucleotide
  modified_base 38: mod_base = OTHER; note = 2'-O-methyl modified nucleotide
  modified_base 39: mod_base = OTHER; note = 2'-O-methyl modified nucleotide
  modified_base 40: mod_base = OTHER; note = 2'-O-methyl modified nucleotide
  modified_base 41: mod_base = OTHER; note = 2'-O-methyl modified nucleotide
  modified_base 42: mod_base = OTHER; note = 2'-O-methyl modified nucleotide
  modified_base 43: mod_base = OTHER; note = 2'-O-methyl modified nucleotide
  modified_base 47: mod_base = OTHER; note = 2'-O-methyl modified nucleotide
  modified_base 48: mod_base = OTHER; note = 2'-O-methyl modified nucleotide
  modified_base 51: mod_base = OTHER; note = 2'-O-methyl modified nucleotide
  modified_base 54: mod_base = OTHER; note = nucleotide with phosphorothioate linkage
  modified_base 58: mod_base = OTHER; note = 2'-O-methyl modified nucleotide
  modified_base 59: mod_base = OTHER; note = 2'-O-methyl modified nucleotide
  modified_base 61: mod_base = OTHER; note = 2'-O-methyl modified nucleotide
  modified_base 62: mod_base = OTHER; note = 2'-O-methyl modified nucleotide
  modified_base 63: mod_base = OTHER; note = 2'-O-methyl modified nucleotide
  modified_base 64: mod_base = OTHER; note = 2'-O-methyl modified nucleotide
  modified_base 65: mod_base = OTHER; note = 2'-O-methyl modified nucleotide
  modified_base 66: mod_base = OTHER; note = 2'-O-methyl modified nucleotide
  modified_base 67: mod_base = OTHER; note = 2'-O-methyl modified nucleotide
  modified_base 68: mod_base = OTHER; note = 2'-O-methyl modified nucleotide
  modified_base 69: mod_base = OTHER; note = 2'-O-methyl modified nucleotide
  modified_base 70: mod_base = OTHER; note = 2'-O-methyl modified nucleotide
  modified_base 75: mod_base = OTHER; note = 2'-O-methyl modified nucleotide
  modified_base 77: mod_base = OTHER; note = 2'-O-methyl modified nucleotide
  modified_base 80: mod_base = OTHER; note = 2'-O-methyl modified nucleotide
  modified_base 86: mod_base = OTHER; note = 2'-O-methyl modified nucleotide
  modified_base 87: mod_base = OTHER; note = 2'-O-methyl modified nucleotide
  modified_base 89: mod_base = OTHER; note = 2'-O-methyl modified nucleotide
  modified_base 90: mod_base = OTHER; note = 2'-O-methyl modified nucleotide
  modified_base 91: mod_base = OTHER; note = 2'-O-methyl modified nucleotide
  modified_base 92: mod_base = OTHER; note = 2'-O-methyl modified nucleotide
  modified_base 99: mod_base = OTHER; note = nucleotide with phosphorothioate linkage
  modified_base 100: mod_base = OTHER; note = 2'-O-methyl modified nucleotide with phosphorothioate linkage
  modified_base 101: mod_base = OTHER; note = 2'-O-methyl modified nucleotide

SEQ ID NO: 2155 - RNA, 101 nt, synthetic construct; identical to SEQ ID NO: 1155
  source 1..101: mol_type = other RNA
  modified_base 1: mod_base = OTHER; note = 2'-O-methyl modified nucleotide with phosphorothioate linkage
  modified_base 2: mod_base = OTHER; note = 2'-O-methyl modified nucleotide with phosphorothioate linkage
  modified_base 3: mod_base = OTHER; note = 2'-O-methyl modified nucleotide with phosphorothioate linkage
  modified_base 4: mod_base = OTHER; note = 2'-O-methyl modified nucleotide
  modified_base 5: mod_base = OTHER; note = 2'-O-methyl modified nucleotide
  modified_base 8: mod_base = OTHER; note = 2'-O-methyl modified nucleotide
  modified_base 9: mod_base = OTHER; note = 2'-O-methyl modified nucleotide
  modified_base 11: mod_base = OTHER; note = 2'-O-methyl modified nucleotide
  modified_base 13: mod_base = OTHER; note = 2'-O-methyl modified nucleotide
  modified_base 18: mod_base = OTHER; note = 2'-O-methyl modified nucleotide
  modified_base 22: mod_base = OTHER; note = 2'-O-methyl modified nucleotide
  modified_base 25: mod_base = OTHER; note = 2'-O-methyl modified nucleotide
  modified_base 29: mod_base = OTHER; note = 2'-O-methyl modified nucleotide
  modified_base 30: mod_base = OTHER; note = 2'-O-methyl modified nucleotide
  modified_base 31: mod_base = OTHER; note = 2'-O-methyl modified nucleotide
  modified_base 32: mod_base = OTHER; note = 2'-O-methyl modified nucleotide
  modified_base 37: mod_base = OTHER; note = 2'-O-methyl modified nucleotide
  modified_base 38: mod_base = OTHER; note = 2'-O-methyl modified nucleotide
  modified_base 39: mod_base = OTHER; note = 2'-O-methyl modified nucleotide
  modified_base 40: mod_base = OTHER; note = 2'-O-methyl modified nucleotide
  modified_base 41: mod_base = OTHER; note = 2'-O-methyl modified nucleotide
  modified_base 42: mod_base = OTHER; note = 2'-O-methyl modified nucleotide
  modified_base 43: mod_base = OTHER; note = 2'-O-methyl modified nucleotide
  modified_base 47: mod_base = OTHER; note = 2'-O-methyl modified nucleotide
  modified_base 48: mod_base = OTHER; note = 2'-O-methyl modified nucleotide
  modified_base 51: mod_base = OTHER; note = 2'-O-methyl modified nucleotide
  modified_base 54: mod_base = OTHER; note = nucleotide with phosphorothioate linkage
  modified_base 58: mod_base = OTHER; note = 2'-O-methyl modified nucleotide
  modified_base 59: mod_base = OTHER; note = 2'-O-methyl modified nucleotide
  modified_base 61: mod_base = OTHER; note = 2'-O-methyl modified nucleotide
  modified_base 62: mod_base = OTHER; note = 2'-O-methyl modified nucleotide
  modified_base 63: mod_base = OTHER; note = 2'-O-methyl modified nucleotide
  modified_base 64: mod_base = OTHER; note = 2'-O-methyl modified nucleotide
  modified_base 65: mod_base = OTHER; note = 2'-O-methyl modified nucleotide
  modified_base 66: mod_base = OTHER; note = 2'-O-methyl modified nucleotide
  modified_base 67: mod_base = OTHER; note = 2'-O-methyl modified nucleotide
  modified_base 68: mod_base = OTHER; note = 2'-O-methyl modified nucleotide
  modified_base 69: mod_base = OTHER; note = 2'-O-methyl modified nucleotide
  modified_base 70: mod_base = OTHER; note = 2'-O-methyl modified nucleotide
  modified_base 75: mod_base = OTHER; note = 2'-O-methyl modified nucleotide
  modified_base 77: mod_base = OTHER; note = 2'-O-methyl modified nucleotide
  modified_base 80: mod_base = OTHER; note = 2'-O-methyl modified nucleotide
  modified_base 86: mod_base = OTHER; note = 2'-O-methyl modified nucleotide
  modified_base 87: mod_base = OTHER; note = 2'-O-methyl modified nucleotide
  modified_base 89: mod_base = OTHER; note = 2'-O-methyl modified nucleotide
  modified_base 90: mod_base = OTHER; note = 2'-O-methyl modified nucleotide
  modified_base 91: mod_base = OTHER; note = 2'-O-methyl modified nucleotide
  modified_base 92: mod_base = OTHER; note = 2'-O-methyl modified nucleotide
  modified_base 99: mod_base = OTHER; note = nucleotide with phosphorothioate linkage
  modified_base 100: mod_base = OTHER; note = 2'-O-methyl modified nucleotide with phosphorothioate linkage
  modified_base 101: mod_base = OTHER; note = 2'-O-methyl modified nucleotide

SEQ ID NO: 2156 - RNA, 101 nt, synthetic construct; identical to SEQ ID NO: 1156
  source 1..101: mol_type = other RNA
  modified_base 1: mod_base = OTHER; note = 2'-O-methyl modified nucleotide with phosphorothioate linkage
  modified_base 2: mod_base = OTHER; note = 2'-O-methyl modified nucleotide with phosphorothioate linkage
  modified_base 3: mod_base = OTHER; note = 2'-O-methyl modified nucleotide with phosphorothioate linkage
  modified_base 4: mod_base = OTHER; note = 2'-O-methyl modified nucleotide
  modified_base 5: mod_base = OTHER; note = 2'-O-methyl modified nucleotide
  modified_base 8: mod_base = OTHER; note = 2'-O-methyl modified nucleotide
  modified_base 9: mod_base = OTHER; note = 2'-O-methyl modified nucleotide
  modified_base 11: mod_base = OTHER; note = 2'-O-methyl modified nucleotide
  modified_base 13: mod_base = OTHER; note = 2'-O-methyl modified nucleotide
  modified_base 18: mod_base = OTHER; note = 2'-O-methyl modified nucleotide
  modified_base 22: mod_base = OTHER; note = 2'-O-methyl modified nucleotide
  modified_base 25: mod_base = OTHER; note = 2'-O-methyl modified nucleotide
  modified_base 29: mod_base = OTHER; note = 2'-O-methyl modified nucleotide
  modified_base 30: mod_base = OTHER; note = 2'-O-methyl modified nucleotide
  modified_base 31: mod_base = OTHER; note = 2'-O-methyl modified nucleotide
  modified_base 32: mod_base = OTHER; note = 2'-O-methyl modified nucleotide
  modified_base 37: mod_base = OTHER; note = 2'-O-methyl modified nucleotide
  modified_base 38: mod_base = OTHER; note = 2'-O-methyl modified nucleotide
  modified_base 39: mod_base = OTHER; note = 2'-O-methyl modified nucleotide
  modified_base 40: mod_base = OTHER; note = 2'-O-methyl modified nucleotide
  modified_base 41: mod_base = OTHER; note = 2'-O-methyl modified nucleotide
  modified_base 42: mod_base = OTHER; note = 2'-O-methyl modified nucleotide
  modified_base 43: mod_base = OTHER; note = 2'-O-methyl modified nucleotide
  modified_base 47: mod_base = OTHER; note = 2'-O-methyl modified nucleotide
  modified_base 48: mod_base = OTHER; note = 2'-O-methyl modified nucleotide
  modified_base 51: mod_base = OTHER; note = 2'-O-methyl modified nucleotide
  modified_base 54: mod_base = OTHER; note = nucleotide with phosphorothioate linkage
  modified_base 58: mod_base = OTHER; note = 2'-O-methyl modified nucleotide
  modified_base 59: mod_base = OTHER; note = 2'-O-methyl modified nucleotide
  modified_base 61: mod_base = OTHER; note = 2'-O-methyl modified nucleotide
  modified_base 62: mod_base = OTHER; note = 2'-O-methyl modified nucleotide
  modified_base 63: mod_base = OTHER; note = 2'-O-methyl modified nucleotide
  modified_base 64: mod_base = OTHER; note = 2'-O-methyl modified nucleotide
  modified_base 65: mod_base = OTHER; note = 2'-O-methyl modified nucleotide
  modified_base 66: mod_base = OTHER; note = 2'-O-methyl modified nucleotide
  modified_base 67: mod_base = OTHER; note = 2'-O-methyl modified nucleotide
  modified_base 68: mod_base = OTHER; note = 2'-O-methyl modified nucleotide
  modified_base 69: mod_base = OTHER; note = 2'-O-methyl modified nucleotide
  modified_base 70: mod_base = OTHER; note = 2'-O-methyl modified nucleotide
  modified_base 75: mod_base = OTHER; note = 2'-O-methyl modified nucleotide
  modified_base 77: mod_base = OTHER; note = 2'-O-methyl modified nucleotide
  modified_base 80: mod_base = OTHER; note = 2'-O-methyl modified nucleotide
  modified_base 86: mod_base = OTHER; note = 2'-O-methyl modified nucleotide
  modified_base 87: mod_base = OTHER; note = 2'-O-methyl modified nucleotide
  modified_base 89: mod_base = OTHER; note = 2'-O-methyl modified nucleotide
  modified_base 90: mod_base = OTHER; note = 2'-O-methyl modified nucleotide
  modified_base 91: mod_base = OTHER; note = 2'-O-methyl modified nucleotide
  modified_base 92: mod_base = OTHER; note = 2'-O-methyl modified nucleotide
  modified_base 99: mod_base = OTHER; note = nucleotide with phosphorothioate linkage
  modified_base 100: mod_base = OTHER; note = 2'-O-methyl modified nucleotide with phosphorothioate linkage
  modified_base 101: mod_base = OTHER; note = 2'-O-methyl modified nucleotide

SEQ ID NO: 2157 - RNA, 101 nt, synthetic construct; identical to SEQ ID NO: 1157
  source 1..101: mol_type = other RNA
  modified_base 1: mod_base = OTHER; note = 2'-O-methyl modified nucleotide with phosphorothioate linkage
  modified_base 2: mod_base = OTHER; note = 2'-O-methyl modified nucleotide with phosphorothioate linkage
  modified_base 3: mod_base = OTHER; note = 2'-O-methyl modified nucleotide with phosphorothioate linkage
  modified_base 4: mod_base = OTHER; note = 2'-O-methyl modified nucleotide
  modified_base 5: mod_base = OTHER; note = 2'-O-methyl modified nucleotide
  modified_base 8: mod_base = OTHER; note = 2'-O-methyl modified nucleotide
  modified_base 9: mod_base = OTHER; note = 2'-O-methyl modified nucleotide
  modified_base 11: mod_base = OTHER; note = 2'-O-methyl modified nucleotide
  modified_base 13: mod_base = OTHER; note = 2'-O-methyl modified nucleotide
  modified_base 18: mod_base = OTHER; note = 2'-O-methyl modified nucleotide
  modified_base 22: mod_base = OTHER; note = 2'-O-methyl modified nucleotide
  modified_base 25: mod_base = OTHER; note = 2'-O-methyl modified nucleotide
  modified_base 29: mod_base = OTHER; note = 2'-O-methyl modified nucleotide
  modified_base 30: mod_base = OTHER; note = 2'-O-methyl modified nucleotide
  modified_base 31: mod_base = OTHER; note = 2'-O-methyl modified nucleotide
  modified_base 32: mod_base = OTHER; note = 2'-O-methyl modified nucleotide
  modified_base 37: mod_base = OTHER; note = 2'-O-methyl modified nucleotide
  modified_base 38: mod_base = OTHER; note = 2'-O-methyl modified nucleotide
  modified_base 39: mod_base = OTHER; note = 2'-O-methyl modified nucleotide
  modified_base 40: mod_base = OTHER; note = 2'-O-methyl modified nucleotide
  modified_base 41: mod_base = OTHER; note = 2'-O-methyl modified nucleotide
  modified_base 42: mod_base = OTHER; note = 2'-O-methyl modified nucleotide
  modified_base 43: mod_base = OTHER; note = 2'-O-methyl modified nucleotide
  modified_base 47: mod_base = OTHER; note = 2'-O-methyl modified nucleotide
  modified_base 48: mod_base = OTHER; note = 2'-O-methyl modified nucleotide
  modified_base 51: mod_base = OTHER; note = 2'-O-methyl modified nucleotide
  modified_base 54: mod_base = OTHER; note = nucleotide with phosphorothioate linkage
  modified_base 58: mod_base = OTHER; note = 2'-O-methyl modified nucleotide
  modified_base 59: mod_base = OTHER; note = 2'-O-methyl modified nucleotide
  modified_base 61: mod_base = OTHER; note = 2'-O-methyl modified nucleotide
  modified_base 62: mod_base = OTHER; note = 2'-O-methyl modified nucleotide
  modified_base 63: mod_base = OTHER; note = 2'-O-methyl modified nucleotide
  modified_base 64: mod_base = OTHER; note = 2'-O-methyl modified nucleotide
  modified_base 65: mod_base = OTHER; note = 2'-O-methyl modified nucleotide
  modified_base 66: mod_base = OTHER; note = 2'-O-methyl modified nucleotide
  modified_base 67: mod_base = OTHER; note = 2'-O-methyl modified nucleotide
  modified_base 68: mod_base = OTHER; note = 2'-O-methyl modified nucleotide
  modified_base 69: mod_base = OTHER; note = 2'-O-methyl modified nucleotide
  modified_base 70: mod_base = OTHER; note = 2'-O-methyl modified nucleotide
  modified_base 75: mod_base = OTHER; note = 2'-O-methyl modified nucleotide
  modified_base 77: mod_base = OTHER; note = 2'-O-methyl modified nucleotide
  modified_base 80: mod_base = OTHER; note = 2'-O-methyl modified nucleotide
  modified_base 86: mod_base = OTHER; note = 2'-O-methyl modified nucleotide
  modified_base 87: mod_base = OTHER; note = 2'-O-methyl modified nucleotide
  modified_base 89: mod_base = OTHER; note = 2'-O-methyl modified nucleotide
  modified_base 90: mod_base = OTHER; note = 2'-O-methyl modified nucleotide
  modified_base 91: mod_base = OTHER; note = 2'-O-methyl modified nucleotide
  modified_base 92: mod_base = OTHER; note = 2'-O-methyl modified nucleotide
  modified_base 99: mod_base = OTHER; note = nucleotide with phosphorothioate linkage
  modified_base 100: mod_base = OTHER; note = 2'-O-methyl modified nucleotide with phosphorothioate linkage
  modified_base 101: mod_base = OTHER; note = 2'-O-methyl modified nucleotide

SEQ ID NO: 2158 - RNA, 101 nt, synthetic construct; identical to SEQ ID NO: 1158
  source 1..101: mol_type = other RNA
  modified_base 1: mod_base = OTHER; note = 2'-O-methyl modified nucleotide with phosphorothioate linkage
  modified_base 2: mod_base = OTHER; note = 2'-O-methyl modified nucleotide with phosphorothioate linkage
  modified_base 3: mod_base = OTHER; note = 2'-O-methyl modified nucleotide with phosphorothioate linkage
  modified_base 4: mod_base = OTHER; note = 2'-O-methyl modified nucleotide
  modified_base 5: mod_base = OTHER; note = 2'-O-methyl modified nucleotide
  modified_base 8: mod_base = OTHER; note = 2'-O-methyl modified nucleotide
  modified_base 9: mod_base = OTHER; note = 2'-O-methyl modified nucleotide
  modified_base 11: mod_base = OTHER; note = 2'-O-methyl modified nucleotide
  modified_base 13: mod_base = OTHER; note = 2'-O-methyl modified nucleotide
  modified_base 18: mod_base = OTHER; note = 2'-O-methyl modified nucleotide
  modified_base 22: mod_base = OTHER; note = 2'-O-methyl modified nucleotide
  modified_base 25: mod_base = OTHER; note = 2'-O-methyl modified nucleotide
  modified_base 29: mod_base = OTHER; note = 2'-O-methyl modified nucleotide
  modified_base 30: mod_base = OTHER; note = 2'-O-methyl modified nucleotide
  modified_base 31: mod_base = OTHER; note = 2'-O-methyl modified nucleotide
  modified_base 32: mod_base = OTHER; note = 2'-O-methyl modified nucleotide
  modified_base 37: mod_base = OTHER; note = 2'-O-methyl modified nucleotide
  modified_base 38: mod_base = OTHER; note = 2'-O-methyl modified nucleotide
  modified_base 39: mod_base = OTHER; note = 2'-O-methyl modified nucleotide
  modified_base 40: mod_base = OTHER; note = 2'-O-methyl modified nucleotide
  modified_base 41: mod_base = OTHER; note = 2'-O-methyl modified nucleotide
  modified_base 42: mod_base = OTHER; note = 2'-O-methyl modified nucleotide
  modified_base 43: mod_base = OTHER; note = 2'-O-methyl modified nucleotide
  modified_base 47: mod_base = OTHER; note = 2'-O-methyl modified nucleotide
  modified_base 48: mod_base = OTHER; note = 2'-O-methyl modified nucleotide
  modified_base 51: mod_base = OTHER; note = 2'-O-methyl modified nucleotide
  modified_base 54: mod_base = OTHER; note = nucleotide with phosphorothioate linkage
  modified_base 58: mod_base = OTHER; note = 2'-O-methyl modified nucleotide
  modified_base 59: mod_base = OTHER; note = 2'-O-methyl modified nucleotide
  modified_base 61: mod_base = OTHER; note = 2'-O-methyl modified nucleotide
  modified_base 62: mod_base = OTHER; note = 2'-O-methyl modified nucleotide
  modified_base 63: mod_base = OTHER; note = 2'-O-methyl modified nucleotide
  modified_base 64: mod_base = OTHER; note = 2'-O-methyl modified nucleotide
  modified_base 65: mod_base = OTHER; note = 2'-O-methyl modified nucleotide
  modified_base 66: mod_base = OTHER; note = 2'-O-methyl modified nucleotide
  modified_base 67: mod_base = OTHER; note = 2'-O-methyl modified nucleotide
  modified_base 68: mod_base = OTHER; note = 2'-O-methyl modified nucleotide
  modified_base 69: mod_base = OTHER; note = 2'-O-methyl modified nucleotide
  modified_base 70: mod_base = OTHER; note = 2'-O-methyl modified nucleotide
  modified_base 75: mod_base = OTHER; note = 2'-O-methyl modified nucleotide
  modified_base 77: mod_base = OTHER; note = 2'-O-methyl modified nucleotide
  modified_base 80: mod_base = OTHER; note = 2'-O-methyl modified nucleotide
  modified_base 86: mod_base = OTHER; note = 2'-O-methyl modified nucleotide
  modified_base 87: mod_base = OTHER; note = 2'-O-methyl modified nucleotide
  modified_base 89: mod_base = OTHER; note = 2'-O-methyl modified nucleotide
  modified_base 90: mod_base = OTHER; note = 2'-O-methyl modified nucleotide
  modified_base 91: mod_base = OTHER; note = 2'-O-methyl modified nucleotide
  modified_base 92: mod_base = OTHER; note = 2'-O-methyl modified nucleotide
  modified_base 99: mod_base = OTHER; note = nucleotide with phosphorothioate linkage
  modified_base 100: mod_base = OTHER; note = 2'-O-methyl modified nucleotide with phosphorothioate linkage
  modified_base 101: mod_base = OTHER; note = 2'-O-methyl modified nucleotide

SEQ ID NO: 2159 - RNA, 101 nt, synthetic construct; identical to SEQ ID NO: 1159
  source 1..101: mol_type = other RNA
  modified_base 1: mod_base = OTHER; note = 2'-O-methyl modified nucleotide with phosphorothioate linkage
  modified_base 2: mod_base = OTHER; note = 2'-O-methyl modified nucleotide with phosphorothioate linkage
  modified_base 3: mod_base = OTHER; note = 2'-O-methyl modified nucleotide with phosphorothioate linkage
  modified_base 4: mod_base = OTHER; note = 2'-O-methyl modified nucleotide
  modified_base 5: mod_base = OTHER; note = 2'-O-methyl modified nucleotide
  modified_base 8: mod_base = OTHER; note = 2'-O-methyl modified nucleotide
  modified_base 9: mod_base = OTHER; note = 2'-O-methyl modified nucleotide
  modified_base 11: mod_base = OTHER; note = 2'-O-methyl modified nucleotide
  modified_base 13: mod_base = OTHER; note = 2'-O-methyl modified nucleotide
  modified_base 18: mod_base = OTHER; note = 2'-O-methyl modified nucleotide
  modified_base 22: mod_base = OTHER; note = 2'-O-methyl modified nucleotide
  modified_base 25: mod_base = OTHER; note = 2'-O-methyl modified nucleotide
  modified_base 29: mod_base = OTHER; note = 2'-O-methyl modified nucleotide
  modified_base 30: mod_base = OTHER; note = 2'-O-methyl modified nucleotide
  modified_base 31: mod_base = OTHER; note = 2'-O-methyl modified nucleotide
  modified_base 32: mod_base = OTHER; note = 2'-O-methyl modified nucleotide
  modified_base 37: mod_base = OTHER; note = 2'-O-methyl modified nucleotide
  modified_base 38: mod_base = OTHER; note = 2'-O-methyl modified nucleotide
  modified_base 39: mod_base = OTHER; note = 2'-O-methyl modified nucleotide
  modified_base 40: mod_base = OTHER; note = 2'-O-methyl modified nucleotide
  modified_base 41: mod_base = OTHER; note = 2'-O-methyl modified nucleotide
  modified_base 42: mod_base = OTHER; note = 2'-O-methyl modified nucleotide
  modified_base 43: mod_base = OTHER; note = 2'-O-methyl modified nucleotide
  modified_base 47: mod_base = OTHER; note = 2'-O-methyl modified nucleotide
  modified_base 48: mod_base = OTHER; note = 2'-O-methyl modified nucleotide
  modified_base 51: mod_base = OTHER; note = 2'-O-methyl modified nucleotide
  modified_base 54: mod_base = OTHER; note = nucleotide with phosphorothioate linkage
  modified_base 58: mod_base = OTHER; note = 2'-O-methyl modified nucleotide
  modified_base 59: mod_base = OTHER; note = 2'-O-methyl modified nucleotide
  modified_base 61: mod_base = OTHER; note = 2'-O-methyl modified nucleotide
  modified_base 62: mod_base = OTHER; note = 2'-O-methyl modified nucleotide
  modified_base 63: mod_base = OTHER; note = 2'-O-methyl modified nucleotide
  modified_base 64: mod_base = OTHER; note = 2'-O-methyl modified nucleotide
  modified_base 65: mod_base = OTHER; note = 2'-O-methyl modified nucleotide
  modified_base 66: mod_base = OTHER; note = 2'-O-methyl modified nucleotide
  modified_base 67: mod_base = OTHER; note = 2'-O-methyl modified nucleotide
  modified_base 68: mod_base = OTHER; note = 2'-O-methyl modified nucleotide
  modified_base 69: mod_base = OTHER; note = 2'-O-methyl modified nucleotide
  modified_base 70: mod_base = OTHER; note = 2'-O-methyl modified nucleotide
  modified_base 75: mod_base = OTHER; note = 2'-O-methyl modified nucleotide
  modified_base 77: mod_base = OTHER; note = 2'-O-methyl modified nucleotide
  modified_base 80: mod_base = OTHER; note = 2'-O-methyl modified nucleotide
  modified_base 86: mod_base = OTHER; note = 2'-O-methyl modified nucleotide
  modified_base 87: mod_base = OTHER; note = 2'-O-methyl modified nucleotide
  modified_base 89: mod_base = OTHER; note = 2'-O-methyl modified nucleotide
  modified_base 90: mod_base = OTHER; note = 2'-O-methyl modified nucleotide
  modified_base 91: mod_base = OTHER; note = 2'-O-methyl modified nucleotide
  modified_base 92: mod_base = OTHER; note = 2'-O-methyl modified nucleotide
  modified_base 99: mod_base = OTHER; note = nucleotide with phosphorothioate linkage
  modified_base 100: mod_base = OTHER; note = 2'-O-methyl modified nucleotide with phosphorothioate linkage
  modified_base 101: mod_base = OTHER; note = 2'-O-methyl modified nucleotide

SEQ ID NO: 2160 - RNA, 101 nt, synthetic construct; identical to SEQ ID NO: 1160
  source 1..101: mol_type = other RNA
  modified_base 1: mod_base = OTHER; note = 2'-O-methyl modified nucleotide with phosphorothioate linkage
  modified_base 2: mod_base = OTHER; note = 2'-O-methyl modified nucleotide with phosphorothioate linkage
  modified_base 3: mod_base = OTHER; note = 2'-O-methyl modified nucleotide with phosphorothioate linkage
  modified_base 4: mod_base = OTHER; note = 2'-O-methyl modified nucleotide
  modified_base 5: mod_base = OTHER; note = 2'-O-methyl modified nucleotide
  modified_base 8: mod_base = OTHER; note = 2'-O-methyl modified nucleotide
  modified_base 9: mod_base = OTHER; note = 2'-O-methyl modified nucleotide
  modified_base 11: mod_base = OTHER; note = 2'-O-methyl modified nucleotide
  modified_base 13: mod_base = OTHER; note = 2'-O-methyl modified nucleotide
  modified_base 18: mod_base = OTHER; note = 2'-O-methyl modified nucleotide
  modified_base 22: mod_base = OTHER; note = 2'-O-methyl modified nucleotide
  modified_base 25: mod_base = OTHER; note = 2'-O-methyl modified nucleotide
  modified_base 29: mod_base = OTHER; note = 2'-O-methyl modified nucleotide
  modified_base 30: mod_base = OTHER; note = 2'-O-methyl modified nucleotide
  modified_base 31: mod_base = OTHER; note = 2'-O-methyl modified nucleotide
  modified_base 32: mod_base = OTHER; note = 2'-O-methyl modified nucleotide
  modified_base 37: mod_base = OTHER; note = 2'-O-methyl modified nucleotide
  modified_base 38: mod_base = OTHER; note = 2'-O-methyl modified nucleotide
  modified_base 39: mod_base = OTHER; note = 2'-O-methyl modified nucleotide
  modified_base 40: mod_base = OTHER; note = 2'-O-methyl modified nucleotide
  modified_base 41: mod_base = OTHER; note = 2'-O-methyl modified nucleotide
  modified_base 42: mod_base = OTHER; note = 2'-O-methyl modified nucleotide
  modified_base 43: mod_base = OTHER; note = 2'-O-methyl modified nucleotide
  modified_base 47: mod_base = OTHER; note = 2'-O-methyl modified nucleotide
  modified_base 48: mod_base = OTHER; note = 2'-O-methyl modified nucleotide
  modified_base 51: mod_base = OTHER; note = 2'-O-methyl modified nucleotide
  modified_base 54: mod_base = OTHER; note = nucleotide with phosphorothioate linkage
  modified_base 58: mod_base = OTHER; note = 2'-O-methyl modified nucleotide
  modified_base 59: mod_base = OTHER; note = 2'-O-methyl modified nucleotide
  modified_base 61: mod_base = OTHER; note = 2'-O-methyl modified nucleotide
  modified_base 62: mod_base = OTHER; note = 2'-O-methyl modified nucleotide
  modified_base 63: mod_base = OTHER; note = 2'-O-methyl modified nucleotide
  modified_base 64: mod_base = OTHER; note = 2'-O-methyl modified nucleotide
  modified_base 65: mod_base = OTHER; note = 2'-O-methyl modified nucleotide
  modified_base 66: mod_base = OTHER; note = 2'-O-methyl modified nucleotide
  modified_base 67: mod_base = OTHER; note = 2'-O-methyl modified nucleotide
  modified_base 68: mod_base = OTHER; note = 2'-O-methyl modified nucleotide
  modified_base 69: mod_base = OTHER; note = 2'-O-methyl modified nucleotide
  modified_base 70: mod_base = OTHER; note = 2'-O-methyl modified nucleotide
  modified_base 75: mod_base = OTHER; note = 2'-O-methyl modified nucleotide
  modified_base 77: mod_base = OTHER; note = 2'-O-methyl modified nucleotide
  modified_base 80: mod_base = OTHER; note = 2'-O-methyl modified nucleotide
  modified_base 86: mod_base = OTHER; note = 2'-O-methyl modified nucleotide
  modified_base 87: mod_base = OTHER; note = 2'-O-methyl modified nucleotide
  modified_base 89: mod_base = OTHER; note = 2'-O-methyl modified nucleotide
  modified_base 90: mod_base = OTHER; note = 2'-O-methyl modified nucleotide
  modified_base 91: mod_base = OTHER; note = 2'-O-methyl modified nucleotide
  modified_base 92: mod_base = OTHER; note = 2'-O-methyl modified nucleotide
  modified_base 99: mod_base = OTHER; note = nucleotide with phosphorothioate linkage
  modified_base 100: mod_base = OTHER; note = 2'-O-methyl modified nucleotide with phosphorothioate linkage
  modified_base 101: mod_base = OTHER; note = 2'-O-methyl modified nucleotide

SEQ ID NO: 2161 - RNA, 101 nt, synthetic construct; identical to SEQ ID NO: 1161
  source 1..101: mol_type = other RNA
  modified_base 1: mod_base = OTHER; note = 2'-O-methyl modified nucleotide with phosphorothioate linkage
  modified_base 2: mod_base = OTHER; note = 2'-O-methyl modified nucleotide with phosphorothioate linkage
  modified_base 3: mod_base = OTHER; note = 2'-O-methyl modified nucleotide with phosphorothioate linkage
  modified_base 4: mod_base = OTHER; note = 2'-O-methyl modified nucleotide
  modified_base 5: mod_base = OTHER; note = 2'-O-methyl modified nucleotide
  modified_base 8: mod_base = OTHER; note = 2'-O-methyl modified nucleotide
  modified_base 9: mod_base = OTHER; note = 2'-O-methyl modified nucleotide
  modified_base 11: mod_base = OTHER; note = 2'-O-methyl modified nucleotide
  modified_base 13: mod_base = OTHER; note = 2'-O-methyl modified nucleotide
  modified_base 18: mod_base = OTHER; note = 2'-O-methyl modified nucleotide
  modified_base 22: mod_base = OTHER; note = 2'-O-methyl modified nucleotide
  modified_base 25: mod_base = OTHER; note = 2'-O-methyl modified nucleotide
  modified_base 29: mod_base = OTHER; note = 2'-O-methyl modified nucleotide
  modified_base 30: mod_base = OTHER; note = 2'-O-methyl modified nucleotide
  modified_base 31: mod_base = OTHER; note = 2'-O-methyl modified nucleotide
  modified_base 32: mod_base = OTHER; note = 2'-O-methyl modified nucleotide
  modified_base 37: mod_base = OTHER; note = 2'-O-methyl modified nucleotide
  modified_base 38: mod_base = OTHER; note = 2'-O-methyl modified nucleotide
  modified_base 39: mod_base = OTHER; note = 2'-O-methyl modified nucleotide
  modified_base 40: mod_base = OTHER; note = 2'-O-methyl modified nucleotide
  modified_base 41: mod_base = OTHER; note = 2'-O-methyl modified nucleotide
  modified_base 42: mod_base = OTHER; note = 2'-O-methyl modified nucleotide
  modified_base 43: mod_base = OTHER; note = 2'-O-methyl modified nucleotide
  modified_base 47: mod_base = OTHER; note = 2'-O-methyl modified nucleotide
  modified_base 48: mod_base = OTHER; note = 2'-O-methyl modified nucleotide
  modified_base 51: mod_base = OTHER; note = 2'-O-methyl modified nucleotide
  modified_base 54: mod_base = OTHER; note = nucleotide with phosphorothioate linkage
  modified_base 58: mod_base = OTHER; note = 2'-O-methyl modified nucleotide
  modified_base 59: mod_base = OTHER; note = 2'-O-methyl modified nucleotide
  modified_base 61: mod_base = OTHER; note = 2'-O-methyl modified nucleotide
  modified_base 62: mod_base = OTHER; note = 2'-O-methyl modified nucleotide
  modified_base 63: mod_base = OTHER; note = 2'-O-methyl modified nucleotide
  modified_base 64: mod_base = OTHER; note = 2'-O-methyl modified nucleotide
  modified_base 65: mod_base = OTHER; note = 2'-O-methyl modified nucleotide
  modified_base 66: mod_base = OTHER; note = 2'-O-methyl modified nucleotide
  modified_base 67: mod_base = OTHER; note = 2'-O-methyl modified nucleotide
  modified_base 68: mod_base = OTHER; note = 2'-O-methyl modified nucleotide
  modified_base 69: mod_base = OTHER; note = 2'-O-methyl modified nucleotide
  modified_base 70: mod_base = OTHER; note = 2'-O-methyl modified nucleotide
  modified_base 75: mod_base = OTHER; note = 2'-O-methyl modified nucleotide
  modified_base 77: mod_base = OTHER; note = 2'-O-methyl modified nucleotide
  modified_base 80: mod_base = OTHER; note = 2'-O-methyl modified nucleotide
  modified_base 86: mod_base = OTHER; note = 2'-O-methyl modified nucleotide
  modified_base 87: mod_base = OTHER; note = 2'-O-methyl modified nucleotide
  modified_base 89: mod_base = OTHER; note = 2'-O-methyl modified nucleotide
  modified_base 90: mod_base = OTHER; note = 2'-O-methyl modified nucleotide
  modified_base 91: mod_base = OTHER; note = 2'-O-methyl modified nucleotide
  modified_base 92: mod_base = OTHER; note = 2'-O-methyl modified nucleotide
  modified_base 99: mod_base = OTHER; note = nucleotide with phosphorothioate linkage
  modified_base 100: mod_base = OTHER; note = 2'-O-methyl modified nucleotide with phosphorothioate linkage
  modified_base 101: mod_base = OTHER; note = 2'-O-methyl modified nucleotide

SEQ ID NO: 2162 - RNA, 101 nt, synthetic construct; identical to SEQ ID NO: 1162
  source 1..101: mol_type = other RNA
  modified_base 1: mod_base = OTHER; note = 2'-O-methyl modified nucleotide with phosphorothioate linkage
  modified_base 2: mod_base = OTHER; note = 2'-O-methyl modified nucleotide with phosphorothioate linkage
  modified_base 3: mod_base = OTHER; note = 2'-O-methyl modified nucleotide with phosphorothioate linkage
  modified_base 4: mod_base = OTHER; note = 2'-O-methyl modified nucleotide
  modified_base 5: mod_base = OTHER; note = 2'-O-methyl modified nucleotide
  modified_base 8: mod_base = OTHER; note = 2'-O-methyl modified nucleotide
  modified_base 9: mod_base = OTHER; note = 2'-O-methyl modified nucleotide
  modified_base 11: mod_base = OTHER; note = 2'-O-methyl modified nucleotide
  modified_base 13: mod_base = OTHER; note = 2'-O-methyl modified nucleotide
  modified_base 18: mod_base = OTHER; note = 2'-O-methyl modified nucleotide
  modified_base 22: mod_base = OTHER; note = 2'-O-methyl modified nucleotide
  modified_base 25: mod_base = OTHER; note = 2'-O-methyl modified nucleotide
  modified_base 29: mod_base = OTHER; note = 2'-O-methyl modified nucleotide
  modified_base 30: mod_base = OTHER; note = 2'-O-methyl modified nucleotide
  modified_base 31: mod_base = OTHER; note = 2'-O-methyl modified nucleotide
  modified_base 32: mod_base = OTHER; note = 2'-O-methyl modified nucleotide
  modified_base 37: mod_base = OTHER; note = 2'-O-methyl modified nucleotide
  modified_base 38: mod_base = OTHER; note = 2'-O-methyl modified nucleotide
  modified_base 39: mod_base = OTHER; note = 2'-O-methyl modified nucleotide
  modified_base 40: mod_base = OTHER; note = 2'-O-methyl modified nucleotide
  modified_base 41: mod_base = OTHER; note = 2'-O-methyl modified nucleotide
  modified_base 42: mod_base = OTHER; note = 2'-O-methyl modified nucleotide
  modified_base 43: mod_base = OTHER; note = 2'-O-methyl modified nucleotide
  modified_base 47: mod_base = OTHER; note = 2'-O-methyl modified nucleotide
  modified_base 48: mod_base = OTHER; note = 2'-O-methyl modified nucleotide
  modified_base 51: mod_base = OTHER; note = 2'-O-methyl modified nucleotide
  modified_base 54: mod_base = OTHER; note = nucleotide with phosphorothioate linkage
  modified_base 58: mod_base = OTHER; note = 2'-O-methyl modified nucleotide
  modified_base 59: mod_base = OTHER; note = 2'-O-methyl modified nucleotide
  modified_base 61: mod_base = OTHER; note = 2'-O-methyl modified nucleotide
  modified_base 62: mod_base = OTHER; note = 2'-O-methyl modified nucleotide
  modified_base 63: mod_base = OTHER; note = 2'-O-methyl modified nucleotide
  modified_base 64: mod_base = OTHER; note = 2'-O-methyl modified nucleotide
  modified_base 65: mod_base = OTHER; note = 2'-O-methyl modified nucleotide
  modified_base 66: mod_base = OTHER; note = 2'-O-methyl modified nucleotide
  modified_base 67: mod_base = OTHER; note = 2'-O-methyl modified nucleotide
  modified_base 68: mod_base = OTHER; note = 2'-O-methyl modified nucleotide
  modified_base 69: mod_base = OTHER; note = 2'-O-methyl modified nucleotide
  modified_base 70: mod_base = OTHER; note = 2'-O-methyl modified nucleotide
  modified_base 75: mod_base = OTHER; note = 2'-O-methyl modified nucleotide
  modified_base 77: mod_base = OTHER; note = 2'-O-methyl modified nucleotide
  modified_base 80: mod_base = OTHER; note = 2'-O-methyl modified nucleotide
  modified_base 86: mod_base = OTHER; note = 2'-O-methyl modified nucleotide
  modified_base 87: mod_base = OTHER; note = 2'-O-methyl modified nucleotide
  modified_base 89: mod_base = OTHER; note = 2'-O-methyl modified nucleotide
  modified_base 90: mod_base = OTHER; note = 2'-O-methyl modified nucleotide
  modified_base 91: mod_base = OTHER; note = 2'-O-methyl modified nucleotide
  modified_base 92: mod_base = OTHER; note = 2'-O-methyl modified nucleotide
  modified_base 99: mod_base = OTHER; note = nucleotide with phosphorothioate linkage
  modified_base 100: mod_base = OTHER; note = 2'-O-methyl modified nucleotide with phosphorothioate linkage
  modified_base 101: mod_base = OTHER; note = 2'-O-methyl modified nucleotide

SEQ ID NO: 2163 - RNA, 101 nt, synthetic construct; identical to SEQ ID NO: 1163
  source 1..101: mol_type = other RNA
  modified_base 1: mod_base = OTHER; note = 2'-O-methyl modified nucleotide with phosphorothioate linkage
  modified_base 2: mod_base = OTHER; note = 2'-O-methyl modified nucleotide with phosphorothioate linkage
  modified_base 3: mod_base = OTHER; note = 2'-O-methyl modified nucleotide with phosphorothioate linkage
  modified_base 4: mod_base = OTHER; note = 2'-O-methyl modified nucleotide
  modified_base 5: mod_base = OTHER; note = 2'-O-methyl modified nucleotide
  modified_base 8: mod_base = OTHER; note = 2'-O-methyl modified nucleotide
  modified_base 9: mod_base = OTHER; note = 2'-O-methyl modified nucleotide
  modified_base 11: mod_base = OTHER; note = 2'-O-methyl modified nucleotide
  modified_base 13: mod_base = OTHER; note = 2'-O-methyl modified nucleotide
  modified_base 18: mod_base = OTHER; note = 2'-O-methyl modified nucleotide
  modified_base 22: mod_base = OTHER; note = 2'-O-methyl modified nucleotide
  modified_base 25: mod_base = OTHER; note = 2'-O-methyl modified nucleotide
  modified_base 29: mod_base = OTHER; note = 2'-O-methyl modified nucleotide
  modified_base 30: mod_base = OTHER; note = 2'-O-methyl modified nucleotide
  modified_base 31: mod_base = OTHER; note = 2'-O-methyl modified nucleotide
  modified_base 32: mod_base = OTHER; note = 2'-O-methyl modified nucleotide
  modified_base 37: mod_base = OTHER; note = 2'-O-methyl modified nucleotide
  modified_base 38: mod_base = OTHER; note = 2'-O-methyl modified nucleotide
  modified_base 39: mod_base = OTHER; note = 2'-O-methyl modified nucleotide
  modified_base 40: mod_base = OTHER; note = 2'-O-methyl modified nucleotide
  modified_base 41: mod_base = OTHER; note = 2'-O-methyl modified nucleotide
  modified_base 42: mod_base = OTHER; note = 2'-O-methyl modified nucleotide
  modified_base 43: mod_base = OTHER; note = 2'-O-methyl modified nucleotide
  modified_base 47: mod_base = OTHER; note = 2'-O-methyl modified nucleotide
  modified_base 48: mod_base = OTHER; note = 2'-O-methyl modified nucleotide
  modified_base 51: mod_base = OTHER; note = 2'-O-methyl modified nucleotide
  modified_base 54: mod_base = OTHER; note = nucleotide with phosphorothioate linkage
  modified_base 58: mod_base = OTHER; note = 2'-O-methyl modified nucleotide
  modified_base 59: mod_base = OTHER; note = 2'-O-methyl modified nucleotide
  modified_base 61: mod_base = OTHER; note = 2'-O-methyl modified nucleotide
  modified_base 62: mod_base = OTHER; note = 2'-O-methyl modified nucleotide
  modified_base 63: mod_base = OTHER; note = 2'-O-methyl modified nucleotide
  modified_base 64: mod_base = OTHER; note = 2'-O-methyl modified nucleotide
  modified_base 65: mod_base = OTHER; note = 2'-O-methyl modified nucleotide
  modified_base 66: mod_base = OTHER; note = 2'-O-methyl modified nucleotide
  modified_base 67: mod_base = OTHER; note = 2'-O-methyl modified nucleotide
  modified_base 68: mod_base = OTHER; note = 2'-O-methyl modified nucleotide
  modified_base 69: mod_base = OTHER; note = 2'-O-methyl modified nucleotide
  modified_base 70: mod_base = OTHER; note = 2'-O-methyl modified nucleotide
  modified_base 75: mod_base = OTHER; note = 2'-O-methyl modified nucleotide
  modified_base 77: mod_base = OTHER; note = 2'-O-methyl modified nucleotide
  modified_base 80: mod_base = OTHER; note = 2'-O-methyl modified nucleotide
  modified_base 86: mod_base = OTHER; note = 2'-O-methyl modified nucleotide
  modified_base 87: mod_base = OTHER; note = 2'-O-methyl modified nucleotide
  modified_base 89: mod_base = OTHER; note = 2'-O-methyl modified nucleotide
  modified_base 90: mod_base = OTHER; note = 2'-O-methyl modified nucleotide
  modified_base 91: mod_base = OTHER; note = 2'-O-methyl modified nucleotide
  modified_base 92: mod_base = OTHER; note = 2'-O-methyl modified nucleotide
  modified_base 99: mod_base = OTHER; note = nucleotide with phosphorothioate linkage
  modified_base 100: mod_base = OTHER; note = 2'-O-methyl modified nucleotide with phosphorothioate linkage
  modified_base 101: mod_base = OTHER; note = 2'-O-methyl modified nucleotide

SEQ ID NO: 2164 - RNA, 101 nt, synthetic construct; identical to SEQ ID NO: 1164
  source 1..101: mol_type = other RNA
  modified_base 1: mod_base = OTHER; note = 2'-O-methyl modified nucleotide with phosphorothioate linkage
  modified_base 2: mod_base = OTHER; note = 2'-O-methyl modified nucleotide with phosphorothioate linkage
  modified_base 3: mod_base = OTHER; note = 2'-O-methyl modified nucleotide with phosphorothioate linkage
  modified_base 4: mod_base = OTHER; note = 2'-O-methyl modified nucleotide
  modified_base 5: mod_base = OTHER; note = 2'-O-methyl modified nucleotide
  modified_base 8: mod_base = OTHER; note = 2'-O-methyl modified nucleotide
  modified_base 9: mod_base = OTHER; note = 2'-O-methyl modified nucleotide
  modified_base 11: mod_base = OTHER; note = 2'-O-methyl modified nucleotide
  modified_base 13: mod_base = OTHER; note = 2'-O-methyl modified nucleotide
  modified_base 18: mod_base = OTHER; note = 2'-O-methyl modified nucleotide
  modified_base 22: mod_base = OTHER; note = 2'-O-methyl modified nucleotide
  modified_base 25: mod_base = OTHER; note = 2'-O-methyl modified nucleotide
  modified_base 29: mod_base = OTHER; note = 2'-O-methyl modified nucleotide
  modified_base 30: mod_base = OTHER; note = 2'-O-methyl modified nucleotide
  modified_base 31: mod_base = OTHER; note = 2'-O-methyl modified nucleotide
  modified_base 32: mod_base = OTHER; note = 2'-O-methyl modified nucleotide
  modified_base 37: mod_base = OTHER; note = 2'-O-methyl modified nucleotide
  modified_base 38: mod_base = OTHER; note = 2'-O-methyl modified nucleotide
  modified_base 39: mod_base = OTHER; note = 2'-O-methyl modified nucleotide
  modified_base 40: mod_base = OTHER; note = 2'-O-methyl modified nucleotide
  modified_base 41: mod_base = OTHER; note = 2'-O-methyl modified nucleotide
  modified_base 42: mod_base = OTHER; note = 2'-O-methyl modified nucleotide
  modified_base 43: mod_base = OTHER; note = 2'-O-methyl modified nucleotide
  modified_base 47: mod_base = OTHER; note = 2'-O-methyl modified nucleotide
  modified_base 48: mod_base = OTHER; note = 2'-O-methyl modified nucleotide
  modified_base 51: mod_base = OTHER; note = 2'-O-methyl modified nucleotide
  modified_base 54: mod_base = OTHER; note = nucleotide with phosphorothioate linkage
  modified_base 58: mod_base = OTHER; note = 2'-O-methyl modified nucleotide
  modified_base 59: mod_base = OTHER; note = 2'-O-methyl modified nucleotide
  modified_base 61: mod_base = OTHER; note = 2'-O-methyl modified nucleotide
  modified_base 62: mod_base = OTHER; note = 2'-O-methyl modified nucleotide
  modified_base 63: mod_base = OTHER; note = 2'-O-methyl modified nucleotide
  modified_base 64: mod_base = OTHER; note = 2'-O-methyl modified nucleotide
  modified_base 65: mod_base = OTHER; note = 2'-O-methyl modified nucleotide
  modified_base 66: mod_base = OTHER; note = 2'-O-methyl modified nucleotide
  modified_base 67: mod_base = OTHER; note = 2'-O-methyl modified nucleotide
  modified_base 68: mod_base = OTHER; note = 2'-O-methyl modified nucleotide
  modified_base 69: mod_base = OTHER; note = 2'-O-methyl modified nucleotide
  modified_base 70: mod_base = OTHER; note = 2'-O-methyl modified nucleotide
  modified_base 75: mod_base = OTHER; note = 2'-O-methyl modified nucleotide
  modified_base 77: mod_base = OTHER; note = 2'-O-methyl modified nucleotide
  modified_base 80: mod_base = OTHER; note = 2'-O-methyl modified nucleotide
  modified_base 86: mod_base = OTHER; note = 2'-O-methyl modified nucleotide
  modified_base 87: mod_base = OTHER; note = 2'-O-methyl modified nucleotide
  modified_base 89: mod_base = OTHER; note = 2'-O-methyl modified nucleotide
  modified_base 90: mod_base = OTHER; note = 2'-O-methyl modified nucleotide
  modified_base 91: mod_base = OTHER; note = 2'-O-methyl modified nucleotide
  modified_base 92: mod_base = OTHER; note = 2'-O-methyl modified nucleotide
  modified_base 99: mod_base = OTHER; note = nucleotide with phosphorothioate linkage
  modified_base 100: mod_base = OTHER; note = 2'-O-methyl modified nucleotide with phosphorothioate linkage
  modified_base 101: mod_base = OTHER; note = 2'-O-methyl modified nucleotide

SEQ ID NO: 2165 - RNA, 101 nt, synthetic construct; identical to SEQ ID NO: 1165
  source 1..101: mol_type = other RNA
  modified_base 1: mod_base = OTHER; note = 2'-O-methyl modified nucleotide with phosphorothioate linkage
  modified_base 2: mod_base = OTHER; note = 2'-O-methyl modified nucleotide with phosphorothioate linkage
  modified_base 3: mod_base = OTHER; note = 2'-O-methyl modified nucleotide with phosphorothioate linkage
  modified_base 4: mod_base = OTHER; note = 2'-O-methyl modified nucleotide
  modified_base 5: mod_base = OTHER; note = 2'-O-methyl modified nucleotide
  modified_base 8: mod_base = OTHER; note = 2'-O-methyl modified nucleotide
  modified_base 9: mod_base = OTHER; note = 2'-O-methyl modified nucleotide
  modified_base 11: mod_base = OTHER; note = 2'-O-methyl modified nucleotide
  modified_base 13: mod_base = OTHER; note = 2'-O-methyl modified nucleotide
  modified_base 18: mod_base = OTHER; note = 2'-O-methyl modified nucleotide
  modified_base 22: mod_base = OTHER; note = 2'-O-methyl modified nucleotide
  modified_base 25: mod_base = OTHER; note = 2'-O-methyl modified nucleotide
  modified_base 29: mod_base = OTHER; note = 2'-O-methyl modified nucleotide
  modified_base 30: mod_base = OTHER; note = 2'-O-methyl modified nucleotide
  modified_base 31: mod_base = OTHER; note = 2'-O-methyl modified nucleotide
  modified_base 32: mod_base = OTHER; note = 2'-O-methyl modified nucleotide
  modified_base 37: mod_base = OTHER; note = 2'-O-methyl modified nucleotide
  modified_base 38: mod_base = OTHER; note = 2'-O-methyl modified nucleotide
  modified_base 39: mod_base = OTHER; note = 2'-O-methyl modified nucleotide
  modified_base 40: mod_base = OTHER; note = 2'-O-methyl modified nucleotide
  modified_base 41: mod_base = OTHER; note = 2'-O-methyl modified nucleotide
  modified_base 42: mod_base = OTHER; note = 2'-O-methyl modified nucleotide
  modified_base 43: mod_base = OTHER; note = 2'-O-methyl modified nucleotide
  modified_base 47: mod_base = OTHER; note = 2'-O-methyl modified nucleotide
  modified_base 48: mod_base = OTHER; note = 2'-O-methyl modified nucleotide
  modified_base 51: mod_base = OTHER; note = 2'-O-methyl modified nucleotide
  modified_base 54: mod_base = OTHER; note = nucleotide with phosphorothioate linkage
  modified_base 58: mod_base = OTHER; note = 2'-O-methyl modified nucleotide
  modified_base 59: mod_base = OTHER; note = 2'-O-methyl modified nucleotide
  modified_base 61: mod_base = OTHER; note = 2'-O-methyl modified nucleotide
  modified_base 62: mod_base = OTHER; note = 2'-O-methyl modified nucleotide
  modified_base 63: mod_base = OTHER; note = 2'-O-methyl modified nucleotide
  modified_base 64: mod_base = OTHER; note = 2'-O-methyl modified nucleotide
  modified_base 65: mod_base = OTHER; note = 2'-O-methyl modified nucleotide
  modified_base 66: mod_base = OTHER; note = 2'-O-methyl modified nucleotide
  modified_base 67: mod_base = OTHER; note = 2'-O-methyl modified nucleotide
  modified_base 68: mod_base = OTHER; note = 2'-O-methyl modified nucleotide
  modified_base 69: mod_base = OTHER; note = 2'-O-methyl modified nucleotide
  modified_base 70: mod_base = OTHER; note = 2'-O-methyl modified nucleotide
  modified_base 75: mod_base = OTHER; note = 2'-O-methyl modified nucleotide
  modified_base 77: mod_base = OTHER; note = 2'-O-methyl modified nucleotide
  modified_base 80: mod_base = OTHER; note = 2'-O-methyl modified nucleotide
  modified_base 86: mod_base = OTHER; note = 2'-O-methyl modified nucleotide
  modified_base 87: mod_base = OTHER; note = 2'-O-methyl modified nucleotide
  modified_base 89: mod_base = OTHER; note = 2'-O-methyl modified nucleotide
  modified_base 90: mod_base = OTHER; note = 2'-O-methyl modified nucleotide
  modified_base 91: mod_base = OTHER; note = 2'-O-methyl modified nucleotide
  modified_base 92: mod_base = OTHER; note = 2'-O-methyl modified nucleotide
  modified_base 99: mod_base = OTHER; note = nucleotide with phosphorothioate linkage
  modified_base 100: mod_base = OTHER; note = 2'-O-methyl modified nucleotide with phosphorothioate linkage
  modified_base 101: mod_base = OTHER; note = 2'-O-methyl modified nucleotide

SEQ ID NO: 2166 - RNA, 101 nt, synthetic construct; identical to SEQ ID NO: 1166
  source 1..101: mol_type = other RNA
  modified_base 1: mod_base = OTHER; note = 2'-O-methyl modified nucleotide with phosphorothioate linkage
  modified_base 2: mod_base = OTHER; note = 2'-O-methyl modified nucleotide with phosphorothioate linkage
  modified_base 3: mod_base = OTHER; note = 2'-O-methyl modified nucleotide with phosphorothioate linkage
  modified_base 4: mod_base = OTHER; note = 2'-O-methyl modified nucleotide
  modified_base 5: mod_base = OTHER; note = 2'-O-methyl modified nucleotide
  modified_base 8: mod_base = OTHER; note = 2'-O-methyl modified nucleotide
  modified_base 9: mod_base = OTHER; note = 2'-O-methyl modified nucleotide
  modified_base 11: mod_base = OTHER; note = 2'-O-methyl modified nucleotide
  modified_base 13: mod_base = OTHER; note = 2'-O-methyl modified nucleotide
  modified_base 18: mod_base = OTHER; note = 2'-O-methyl modified nucleotide
  modified_base 22: mod_base = OTHER; note = 2'-O-methyl modified nucleotide
  modified_base 25: mod_base = OTHER; note = 2'-O-methyl modified nucleotide
  modified_base 29: mod_base = OTHER; note = 2'-O-methyl modified nucleotide
  modified_base 30: mod_base = OTHER; note = 2'-O-methyl modified nucleotide
  modified_base 31: mod_base = OTHER; note = 2'-O-methyl modified nucleotide
  modified_base 32: mod_base = OTHER; note = 2'-O-methyl modified nucleotide
  modified_base 37: mod_base = OTHER; note = 2'-O-methyl modified nucleotide
  modified_base 38: mod_base = OTHER; note = 2'-O-methyl modified nucleotide
  modified_base 39: mod_base = OTHER; note = 2'-O-methyl modified nucleotide
  modified_base 40: mod_base = OTHER; note = 2'-O-methyl modified nucleotide
  modified_base 41: mod_base = OTHER; note = 2'-O-methyl modified nucleotide
  modified_base 42: mod_base = OTHER; note = 2'-O-methyl modified nucleotide
  modified_base 43: mod_base = OTHER; note = 2'-O-methyl modified nucleotide
  modified_base 47: mod_base = OTHER; note = 2'-O-methyl modified nucleotide
  modified_base 48: mod_base = OTHER; note = 2'-O-methyl modified nucleotide
  modified_base 51: mod_base = OTHER; note = 2'-O-methyl modified nucleotide
  modified_base 54: mod_base = OTHER; note = nucleotide with phosphorothioate linkage
  modified_base 58: mod_base = OTHER; note = 2'-O-methyl modified nucleotide
  modified_base 59: mod_base = OTHER; note = 2'-O-methyl modified nucleotide
  modified_base 61: mod_base = OTHER; note = 2'-O-methyl modified nucleotide
  modified_base 62: mod_base = OTHER; note = 2'-O-methyl modified nucleotide
  modified_base 63: mod_base = OTHER; note = 2'-O-methyl modified nucleotide
  modified_base 64: mod_base = OTHER; note = 2'-O-methyl modified nucleotide
  modified_base 65: mod_base = OTHER; note = 2'-O-methyl modified nucleotide
  modified_base 66: mod_base = OTHER; note = 2'-O-methyl modified nucleotide
  modified_base 67: mod_base = OTHER; note = 2'-O-methyl modified nucleotide
  modified_base 68: mod_base = OTHER; note = 2'-O-methyl modified nucleotide
  modified_base 69: mod_base = OTHER; note = 2'-O-methyl modified nucleotide
  modified_base 70: mod_base = OTHER; note = 2'-O-methyl modified nucleotide
  modified_base 75: mod_base = OTHER; note = 2'-O-methyl modified nucleotide
  modified_base 77: mod_base = OTHER; note = 2'-O-methyl modified nucleotide
  modified_base 80: mod_base = OTHER; note = 2'-O-methyl modified nucleotide
  modified_base 86: mod_base = OTHER; note = 2'-O-methyl modified nucleotide
  modified_base 87: mod_base = OTHER; note = 2'-O-methyl modified nucleotide
  modified_base 89: mod_base = OTHER; note = 2'-O-methyl modified nucleotide
  modified_base 90: mod_base = OTHER; note = 2'-O-methyl modified nucleotide
  modified_base 91: mod_base = OTHER; note = 2'-O-methyl modified nucleotide
  modified_base 92: mod_base = OTHER; note = 2'-O-methyl modified nucleotide
  modified_base 99: mod_base = OTHER; note = nucleotide with phosphorothioate linkage
  modified_base 100: mod_base = OTHER; note = 2'-O-methyl modified nucleotide with phosphorothioate linkage
  modified_base 101: mod_base = OTHER; note = 2'-O-methyl modified nucleotide

SEQ ID NO: 2167 - RNA, 101 nt, synthetic construct; identical to SEQ ID NO: 1167
  source 1..101: mol_type = other RNA
  modified_base 1: mod_base = OTHER; note = 2'-O-methyl modified nucleotide with phosphorothioate linkage
  modified_base 2: mod_base = OTHER; note = 2'-O-methyl modified nucleotide with phosphorothioate linkage
  modified_base 3: mod_base = OTHER; note = 2'-O-methyl modified nucleotide with phosphorothioate linkage
  modified_base 4: mod_base = OTHER; note = 2'-O-methyl modified nucleotide
  modified_base 5: mod_base = OTHER; note = 2'-O-methyl modified nucleotide
  modified_base 8: mod_base = OTHER; note = 2'-O-methyl modified nucleotide
  modified_base 9: mod_base = OTHER; note = 2'-O-methyl modified nucleotide
  modified_base 11: mod_base = OTHER; note = 2'-O-methyl modified nucleotide
  modified_base 13: mod_base = OTHER; note = 2'-O-methyl modified nucleotide
  modified_base 18: mod_base = OTHER; note = 2'-O-methyl modified nucleotide
  modified_base 22: mod_base = OTHER; note = 2'-O-methyl modified nucleotide
  modified_base 25: mod_base = OTHER; note = 2'-O-methyl modified nucleotide
  modified_base 29: mod_base = OTHER; note = 2'-O-methyl modified nucleotide
  modified_base 30: mod_base = OTHER; note = 2'-O-methyl modified nucleotide
  modified_base 31: mod_base = OTHER; note = 2'-O-methyl modified nucleotide
  modified_base 32: mod_base = OTHER; note = 2'-O-methyl modified nucleotide
  modified_base 37: mod_base = OTHER; note = 2'-O-methyl modified nucleotide
  modified_base 38: mod_base = OTHER; note = 2'-O-methyl modified nucleotide
  modified_base 39: mod_base = OTHER; note = 2'-O-methyl modified nucleotide
  modified_base 40: mod_base = OTHER; note = 2'-O-methyl modified nucleotide
  modified_base 41: mod_base = OTHER; note = 2'-O-methyl modified nucleotide
  modified_base 42: mod_base = OTHER; note = 2'-O-methyl modified nucleotide
  modified_base 43: mod_base = OTHER; note = 2'-O-methyl modified nucleotide
  modified_base 47: mod_base = OTHER; note = 2'-O-methyl modified nucleotide
  modified_base 48: mod_base = OTHER; note = 2'-O-methyl modified nucleotide
  modified_base 51: mod_base = OTHER; note = 2'-O-methyl modified nucleotide
  modified_base 54: mod_base = OTHER; note = nucleotide with phosphorothioate linkage
  modified_base 58: mod_base = OTHER; note = 2'-O-methyl modified nucleotide
  modified_base 59: mod_base = OTHER; note = 2'-O-methyl modified nucleotide
  modified_base 61: mod_base = OTHER; note = 2'-O-methyl modified nucleotide
  modified_base 62: mod_base = OTHER; note = 2'-O-methyl modified nucleotide
  modified_base 63: mod_base = OTHER; note = 2'-O-methyl modified nucleotide
  modified_base 64: mod_base = OTHER; note = 2'-O-methyl modified nucleotide
  modified_base 65: mod_base = OTHER; note = 2'-O-methyl modified nucleotide
  modified_base 66: mod_base = OTHER; note = 2'-O-methyl modified nucleotide
  modified_base 67: mod_base = OTHER; note = 2'-O-methyl modified nucleotide
  modified_base 68: mod_base = OTHER; note = 2'-O-methyl modified nucleotide
  modified_base 69: mod_base = OTHER; note = 2'-O-methyl modified nucleotide
  modified_base 70: mod_base = OTHER; note = 2'-O-methyl modified nucleotide
  modified_base 75: mod_base = OTHER; note = 2'-O-methyl modified nucleotide
  modified_base 77: mod_base = OTHER; note = 2'-O-methyl modified nucleotide
  modified_base 80: mod_base = OTHER; note = 2'-O-methyl modified nucleotide
  modified_base 86: mod_base = OTHER; note = 2'-O-methyl modified nucleotide
  modified_base 87: mod_base = OTHER; note = 2'-O-methyl modified nucleotide
  modified_base 89: mod_base = OTHER; note = 2'-O-methyl modified nucleotide
  modified_base 90: mod_base = OTHER; note = 2'-O-methyl modified nucleotide
  modified_base 91: mod_base = OTHER; note = 2'-O-methyl modified nucleotide
  modified_base 92: mod_base = OTHER; note = 2'-O-methyl modified nucleotide
  modified_base 99: mod_base = OTHER; note = nucleotide with phosphorothioate linkage
  modified_base 100: mod_base = OTHER; note = 2'-O-methyl modified nucleotide with phosphorothioate linkage
  modified_base 101: mod_base = OTHER; note = 2'-O-methyl modified nucleotide

SEQ ID NO: 2168 - RNA, 101 nt, synthetic construct; identical to SEQ ID NO: 1168
  source 1..101: mol_type = other RNA
  modified_base 1: mod_base = OTHER; note = 2'-O-methyl modified nucleotide with phosphorothioate linkage
  modified_base 2: mod_base = OTHER; note = 2'-O-methyl modified nucleotide with phosphorothioate linkage
  modified_base 3: mod_base = OTHER; note = 2'-O-methyl modified nucleotide with phosphorothioate linkage
  modified_base 4: mod_base = OTHER; note = 2'-O-methyl modified nucleotide
  modified_base 5: mod_base = OTHER; note = 2'-O-methyl modified nucleotide
  modified_base 8: mod_base = OTHER; note = 2'-O-methyl modified nucleotide
  modified_base 9: mod_base = OTHER; note = 2'-O-methyl modified nucleotide
  modified_base 11: mod_base = OTHER; note = 2'-O-methyl modified nucleotide
  modified_base 13: mod_base = OTHER; note = 2'-O-methyl modified nucleotide
  modified_base 18: mod_base = OTHER; note = 2'-O-methyl modified nucleotide
  modified_base 22: mod_base = OTHER; note = 2'-O-methyl modified nucleotide
  modified_base 25: mod_base = OTHER; note = 2'-O-methyl modified nucleotide
  modified_base 29: mod_base = OTHER; note = 2'-O-methyl modified nucleotide
  modified_base 30: mod_base = OTHER; note = 2'-O-methyl modified nucleotide
  modified_base 31: mod_base = OTHER; note = 2'-O-methyl modified nucleotide
  modified_base 32: mod_base = OTHER; note = 2'-O-methyl modified nucleotide
  modified_base 37: mod_base = OTHER; note = 2'-O-methyl modified nucleotide
  modified_base 38: mod_base = OTHER; note = 2'-O-methyl modified nucleotide
  modified_base 39: mod_base = OTHER; note = 2'-O-methyl modified nucleotide
  modified_base 40: mod_base = OTHER; note = 2'-O-methyl modified nucleotide
  modified_base 41: mod_base = OTHER; note = 2'-O-methyl modified nucleotide
  modified_base 42: mod_base = OTHER; note = 2'-O-methyl modified nucleotide
  modified_base 43: mod_base = OTHER; note = 2'-O-methyl modified nucleotide
  modified_base 47: mod_base = OTHER; note = 2'-O-methyl modified nucleotide
  modified_base 48: mod_base = OTHER; note = 2'-O-methyl modified nucleotide
  modified_base 51: mod_base = OTHER; note = 2'-O-methyl modified nucleotide
  modified_base 54: mod_base = OTHER; note = nucleotide with phosphorothioate linkage
  modified_base 58: mod_base = OTHER; note = 2'-O-methyl modified nucleotide
  modified_base 59: mod_base = OTHER; note = 2'-O-methyl modified nucleotide
  modified_base 61: mod_base = OTHER; note = 2'-O-methyl modified nucleotide
  modified_base 62: mod_base = OTHER; note = 2'-O-methyl modified nucleotide
  modified_base 63: mod_base = OTHER; note = 2'-O-methyl modified nucleotide
  modified_base 64: mod_base = OTHER; note = 2'-O-methyl modified nucleotide
  modified_base 65: mod_base = OTHER; note = 2'-O-methyl modified nucleotide
  modified_base 66: mod_base = OTHER; note = 2'-O-methyl modified nucleotide
  modified_base 67: mod_base = OTHER; note = 2'-O-methyl modified nucleotide
  modified_base 68: mod_base = OTHER; note = 2'-O-methyl modified nucleotide
  modified_base 69: mod_base = OTHER; note = 2'-O-methyl modified nucleotide
  modified_base 70: mod_base = OTHER; note = 2'-O-methyl modified nucleotide
  modified_base 75: mod_base = OTHER; note = 2'-O-methyl modified nucleotide
  modified_base 77: mod_base = OTHER; note = 2'-O-methyl modified nucleotide
  modified_base 80: mod_base = OTHER; note = 2'-O-methyl modified nucleotide
  modified_base 86: mod_base = OTHER; note = 2'-O-methyl modified nucleotide
  modified_base 87: mod_base = OTHER; note = 2'-O-methyl modified nucleotide
  modified_base 89: mod_base = OTHER; note = 2'-O-methyl modified nucleotide
  modified_base 90: mod_base = OTHER; note = 2'-O-methyl modified nucleotide
  modified_base 91: mod_base = OTHER; note = 2'-O-methyl modified nucleotide
  modified_base 92: mod_base = OTHER; note = 2'-O-methyl modified nucleotide
  modified_base 99: mod_base = OTHER; note = nucleotide with phosphorothioate linkage
  modified_base 100: mod_base = OTHER; note = 2'-O-methyl modified nucleotide with phosphorothioate linkage
  modified_base 101: mod_base = OTHER; note = 2'-O-methyl modified nucleotide

SEQ ID NO: 2169 - RNA, 101 nt, synthetic construct; identical to SEQ ID NO: 1169
  source 1..101: mol_type = other RNA
  modified_base 1: mod_base = OTHER; note = 2'-O-methyl modified nucleotide with phosphorothioate linkage
  modified_base 2: mod_base = OTHER; note = 2'-O-methyl modified nucleotide with phosphorothioate linkage
  modified_base 3: mod_base = OTHER; note = 2'-O-methyl modified nucleotide with phosphorothioate linkage
  modified_base 4: mod_base = OTHER; note = 2'-O-methyl modified nucleotide
  modified_base 5: mod_base = OTHER; note = 2'-O-methyl modified nucleotide
  modified_base 8: mod_base = OTHER; note = 2'-O-methyl modified nucleotide
  modified_base 9: mod_base = OTHER; note = 2'-O-methyl modified nucleotide
  modified_base 11: mod_base = OTHER; note = 2'-O-methyl modified nucleotide
  modified_base 13: mod_base = OTHER; note = 2'-O-methyl modified nucleotide
  modified_base 18: mod_base = OTHER; note = 2'-O-methyl modified nucleotide
  modified_base 22: mod_base = OTHER; note = 2'-O-methyl modified nucleotide
  modified_base 25: mod_base = OTHER; note = 2'-O-methyl modified nucleotide
  modified_base 29: mod_base = OTHER; note = 2'-O-methyl modified nucleotide
  modified_base 30: mod_base = OTHER; note = 2'-O-methyl modified nucleotide
  modified_base 31: mod_base = OTHER; note = 2'-O-methyl modified nucleotide
  modified_base 32: mod_base = OTHER; note = 2'-O-methyl modified nucleotide
  modified_base 37: mod_base = OTHER; note = 2'-O-methyl modified nucleotide
  modified_base 38: mod_base = OTHER; note = 2'-O-methyl modified nucleotide
  modified_base 39: mod_base = OTHER; note = 2'-O-methyl modified nucleotide
  modified_base 40: mod_base = OTHER; note = 2'-O-methyl modified nucleotide
  modified_base 41: mod_base = OTHER; note = 2'-O-methyl modified nucleotide
  modified_base 42: mod_base = OTHER; note = 2'-O-methyl modified nucleotide
  modified_base 43: mod_base = OTHER; note = 2'-O-methyl modified nucleotide
  modified_base 47: mod_base = OTHER; note = 2'-O-methyl modified nucleotide
  modified_base 48: mod_base = OTHER; note = 2'-O-methyl modified nucleotide
  modified_base 51: mod_base = OTHER; note = 2'-O-methyl modified nucleotide
  modified_base 54: mod_base = OTHER; note = nucleotide with phosphorothioate linkage
  modified_base 58: mod_base = OTHER; note = 2'-O-methyl modified nucleotide
  modified_base 59: mod_base = OTHER; note = 2'-O-methyl modified nucleotide
  modified_base 61: mod_base = OTHER; note = 2'-O-methyl modified nucleotide
  modified_base 62: mod_base = OTHER; note = 2'-O-methyl modified nucleotide
  modified_base 63: mod_base = OTHER; note = 2'-O-methyl modified nucleotide
  modified_base 64: mod_base = OTHER; note = 2'-O-methyl modified nucleotide
  modified_base 65: mod_base = OTHER; note = 2'-O-methyl modified nucleotide
  modified_base 66: mod_base = OTHER; note = 2'-O-methyl modified nucleotide
  modified_base 67: mod_base = OTHER; note = 2'-O-methyl modified nucleotide
  modified_base 68: mod_base = OTHER; note = 2'-O-methyl modified nucleotide
  modified_base 69: mod_base = OTHER; note = 2'-O-methyl modified nucleotide
  modified_base 70: mod_base = OTHER; note = 2'-O-methyl modified nucleotide
  modified_base 75: mod_base = OTHER; note = 2'-O-methyl modified nucleotide
  modified_base 77: mod_base = OTHER; note = 2'-O-methyl modified nucleotide
  modified_base 80: mod_base = OTHER; note = 2'-O-methyl modified nucleotide
  modified_base 86: mod_base = OTHER; note = 2'-O-methyl modified nucleotide
  modified_base 87: mod_base = OTHER; note = 2'-O-methyl modified nucleotide
  modified_base 89: mod_base = OTHER; note = 2'-O-methyl modified nucleotide
  modified_base 90: mod_base = OTHER; note = 2'-O-methyl modified nucleotide
  modified_base 91: mod_base = OTHER; note = 2'-O-methyl modified nucleotide
  modified_base 92: mod_base = OTHER; note = 2'-O-methyl modified nucleotide
  modified_base 99: mod_base = OTHER; note = nucleotide with phosphorothioate linkage
  modified_base 100: mod_base = OTHER; note = 2'-O-methyl modified nucleotide with phosphorothioate linkage
  modified_base 101: mod_base = OTHER; note = 2'-O-methyl modified nucleotide

SEQ ID NO: 2170 - RNA, 101 nt, synthetic construct; identical to SEQ ID NO: 1170
  source 1..101: mol_type = other RNA
  modified_base 1: mod_base = OTHER; note = 2'-O-methyl modified nucleotide with phosphorothioate linkage
  modified_base 2: mod_base = OTHER; note = 2'-O-methyl modified nucleotide with phosphorothioate linkage
  modified_base 3: mod_base = OTHER; note = 2'-O-methyl modified nucleotide with phosphorothioate linkage
  modified_base 4: mod_base = OTHER; note = 2'-O-methyl modified nucleotide
  modified_base 5: mod_base = OTHER; note = 2'-O-methyl modified nucleotide
  modified_base 8: mod_base = OTHER; note = 2'-O-methyl modified nucleotide
  modified_base 9: mod_base = OTHER; note = 2'-O-methyl modified nucleotide
  modified_base 11: mod_base = OTHER; note = 2'-O-methyl modified nucleotide
  modified_base 13: mod_base = OTHER; note = 2'-O-methyl modified nucleotide
  modified_base 18: mod_base = OTHER; note = 2'-O-methyl modified nucleotide
  modified_base 22: mod_base = OTHER; note = 2'-O-methyl modified nucleotide
  modified_base 25: mod_base = OTHER; note = 2'-O-methyl modified nucleotide
  modified_base 29: mod_base = OTHER; note = 2'-O-methyl modified nucleotide
  modified_base 30: mod_base = OTHER; note = 2'-O-methyl modified nucleotide
  modified_base 31: mod_base = OTHER; note = 2'-O-methyl modified nucleotide
  modified_base 32: mod_base = OTHER; note = 2'-O-methyl modified nucleotide
  modified_base 37: mod_base = OTHER; note = 2'-O-methyl modified nucleotide
  modified_base 38: mod_base = OTHER; note = 2'-O-methyl modified nucleotide
  modified_base 39: mod_base = OTHER; note = 2'-O-methyl modified nucleotide
  modified_base 40: mod_base = OTHER; note = 2'-O-methyl modified nucleotide
  modified_base 41: mod_base = OTHER; note = 2'-O-methyl modified nucleotide
  modified_base 42: mod_base = OTHER; note = 2'-O-methyl modified nucleotide
  modified_base 43: mod_base = OTHER; note = 2'-O-methyl modified nucleotide
  modified_base 47: mod_base = OTHER; note = 2'-O-methyl modified nucleotide
  modified_base 48: mod_base = OTHER; note = 2'-O-methyl modified nucleotide
  modified_base 51: mod_base = OTHER; note = 2'-O-methyl modified nucleotide
  modified_base 54: mod_base = OTHER; note = nucleotide with phosphorothioate linkage
  modified_base 58: mod_base = OTHER; note = 2'-O-methyl modified nucleotide
  modified_base 59: mod_base = OTHER; note = 2'-O-methyl modified nucleotide
  modified_base 61: mod_base = OTHER; note = 2'-O-methyl modified nucleotide
  modified_base 62: mod_base = OTHER; note = 2'-O-methyl modified nucleotide
  modified_base 63: mod_base = OTHER; note = 2'-O-methyl modified nucleotide
  modified_base 64: mod_base = OTHER; note = 2'-O-methyl modified nucleotide
  modified_base 65: mod_base = OTHER; note = 2'-O-methyl modified nucleotide
  modified_base 66: mod_base = OTHER; note = 2'-O-methyl modified nucleotide
  modified_base 67: mod_base = OTHER; note = 2'-O-methyl modified nucleotide
  modified_base 68: mod_base = OTHER; note = 2'-O-methyl modified nucleotide
  modified_base 69: mod_base = OTHER; note = 2'-O-methyl modified nucleotide
  modified_base 70: mod_base = OTHER; note = 2'-O-methyl modified nucleotide
  modified_base 75: mod_base = OTHER; note = 2'-O-methyl modified nucleotide
  modified_base 77: mod_base = OTHER; note = 2'-O-methyl modified nucleotide
  modified_base 80: mod_base = OTHER; note = 2'-O-methyl modified nucleotide
  modified_base 86: mod_base = OTHER; note = 2'-O-methyl modified nucleotide
  modified_base 87: mod_base = OTHER; note = 2'-O-methyl modified nucleotide
  modified_base 89: mod_base = OTHER; note = 2'-O-methyl modified nucleotide
  modified_base 90: mod_base = OTHER; note = 2'-O-methyl modified nucleotide
  modified_base 91: mod_base = OTHER; note = 2'-O-methyl modified nucleotide
  modified_base 92: mod_base = OTHER; note = 2'-O-methyl modified nucleotide
  modified_base 99: mod_base = OTHER; note = nucleotide with phosphorothioate linkage
  modified_base 100: mod_base = OTHER; note = 2'-O-methyl modified nucleotide with phosphorothioate linkage
  modified_base 101: mod_base = OTHER; note = 2'-O-methyl modified nucleotide

SEQ ID NO: 2171 - RNA, 101 nt, synthetic construct; identical to SEQ ID NO: 1171
  source 1..101: mol_type = other RNA
  modified_base 1: mod_base = OTHER; note = 2'-O-methyl modified nucleotide with phosphorothioate linkage
  modified_base 2: mod_base = OTHER; note = 2'-O-methyl modified nucleotide with phosphorothioate linkage
  modified_base 3: mod_base = OTHER; note = 2'-O-methyl modified nucleotide with phosphorothioate linkage
  modified_base 4: mod_base = OTHER; note = 2'-O-methyl modified nucleotide
  modified_base 5: mod_base = OTHER; note = 2'-O-methyl modified nucleotide
  modified_base 8: mod_base = OTHER; note = 2'-O-methyl modified nucleotide
  modified_base 9: mod_base = OTHER; note = 2'-O-methyl modified nucleotide
  modified_base 11: mod_base = OTHER; note = 2'-O-methyl modified nucleotide
  modified_base 13: mod_base = OTHER; note = 2'-O-methyl modified nucleotide
  modified_base 18: mod_base = OTHER; note = 2'-O-methyl modified nucleotide
  modified_base 22: mod_base = OTHER; note = 2'-O-methyl modified nucleotide
  modified_base 25: mod_base = OTHER; note = 2'-O-methyl modified nucleotide
  modified_base 29: mod_base = OTHER; note = 2'-O-methyl modified nucleotide
  modified_base 30: mod_base = OTHER; note = 2'-O-methyl modified nucleotide
  modified_base 31: mod_base = OTHER; note = 2'-O-methyl modified nucleotide
  modified_base 32: mod_base = OTHER; note = 2'-O-methyl modified nucleotide
  modified_base 37: mod_base = OTHER; note = 2'-O-methyl modified nucleotide
  modified_base 38: mod_base = OTHER; note = 2'-O-methyl modified nucleotide
  modified_base 39: mod_base = OTHER; note = 2'-O-methyl modified nucleotide
  modified_base 40: mod_base = OTHER; note = 2'-O-methyl modified nucleotide
  modified_base 41: mod_base = OTHER; note = 2'-O-methyl modified nucleotide
  modified_base 42: mod_base = OTHER; note = 2'-O-methyl modified nucleotide
  modified_base 43: mod_base = OTHER; note = 2'-O-methyl modified nucleotide
  modified_base 47: mod_base = OTHER; note = 2'-O-methyl modified nucleotide
  modified_base 48: mod_base = OTHER; note = 2'-O-methyl modified nucleotide
  modified_base 51: mod_base = OTHER; note = 2'-O-methyl modified nucleotide
  modified_base 54: mod_base = OTHER; note = nucleotide with phosphorothioate linkage
  modified_base 58: mod_base = OTHER; note = 2'-O-methyl modified nucleotide
  modified_base 59: mod_base = OTHER; note = 2'-O-methyl modified nucleotide
  modified_base 61: mod_base = OTHER; note = 2'-O-methyl modified nucleotide
  modified_base 62: mod_base = OTHER; note = 2'-O-methyl modified nucleotide
  modified_base 63: mod_base = OTHER; note = 2'-O-methyl modified nucleotide
  modified_base 64: mod_base = OTHER; note = 2'-O-methyl modified nucleotide
  modified_base 65: mod_base = OTHER; note = 2'-O-methyl modified nucleotide
  modified_base 66: mod_base = OTHER; note = 2'-O-methyl modified nucleotide
  modified_base 67: mod_base = OTHER; note = 2'-O-methyl modified nucleotide
  modified_base 68: mod_base = OTHER; note = 2'-O-methyl modified nucleotide
  modified_base 69: mod_base = OTHER; note = 2'-O-methyl modified nucleotide
  modified_base 70: mod_base = OTHER; note = 2'-O-methyl modified nucleotide
  modified_base 75: mod_base = OTHER; note = 2'-O-methyl modified nucleotide
  modified_base 77: mod_base = OTHER; note = 2'-O-methyl modified nucleotide
  modified_base 80: mod_base = OTHER; note = 2'-O-methyl modified nucleotide
  modified_base 86: mod_base = OTHER; note = 2'-O-methyl modified nucleotide
  modified_base 87: mod_base = OTHER; note = 2'-O-methyl modified nucleotide
  modified_base 89: mod_base = OTHER; note = 2'-O-methyl modified nucleotide
  modified_base 90: mod_base = OTHER; note = 2'-O-methyl modified nucleotide
  modified_base 91: mod_base = OTHER; note = 2'-O-methyl modified nucleotide
  modified_base 92: mod_base = OTHER; note = 2'-O-methyl modified nucleotide
  modified_base 99: mod_base = OTHER; note = nucleotide with phosphorothioate linkage
  modified_base 100: mod_base = OTHER; note = 2'-O-methyl modified nucleotide with phosphorothioate linkage
  modified_base 101: mod_base = OTHER; note = 2'-O-methyl modified nucleotide

SEQ ID NO: 2172 - RNA, 101 nt, synthetic construct; identical to SEQ ID NO: 1172
  source 1..101: mol_type = other RNA
  modified_base 1: mod_base = OTHER; note = 2'-O-methyl modified nucleotide with phosphorothioate linkage
  modified_base 2: mod_base = OTHER; note = 2'-O-methyl modified nucleotide with phosphorothioate linkage
  modified_base 3: mod_base = OTHER; note = 2'-O-methyl modified nucleotide with phosphorothioate linkage
  modified_base 4: mod_base = OTHER; note = 2'-O-methyl modified nucleotide
  modified_base 5: mod_base = OTHER; note = 2'-O-methyl modified nucleotide
  modified_base 8: mod_base = OTHER; note = 2'-O-methyl modified nucleotide
  modified_base 9: mod_base = OTHER; note = 2'-O-methyl modified nucleotide
  modified_base 11: mod_base = OTHER; note = 2'-O-methyl modified nucleotide
  modified_base 13: mod_base = OTHER; note = 2'-O-methyl modified nucleotide
  modified_base 18: mod_base = OTHER; note = 2'-O-methyl modified nucleotide
  modified_base 22: mod_base = OTHER; note = 2'-O-methyl modified nucleotide
  modified_base 25: mod_base = OTHER; note = 2'-O-methyl modified nucleotide
  modified_base 29: mod_base = OTHER; note = 2'-O-methyl modified nucleotide
  modified_base 30: mod_base = OTHER; note = 2'-O-methyl modified nucleotide
  modified_base 31: mod_base = OTHER; note = 2'-O-methyl modified nucleotide
  modified_base 32: mod_base = OTHER; note = 2'-O-methyl modified nucleotide
  modified_base 37: mod_base = OTHER; note = 2'-O-methyl modified nucleotide
  modified_base 38: mod_base = OTHER; note = 2'-O-methyl modified nucleotide
  modified_base 39: mod_base = OTHER; note = 2'-O-methyl modified nucleotide
  modified_base 40: mod_base = OTHER; note = 2'-O-methyl modified nucleotide
  modified_base 41: mod_base = OTHER; note = 2'-O-methyl modified nucleotide
  modified_base 42: mod_base = OTHER; note = 2'-O-methyl modified nucleotide
  modified_base 43: mod_base = OTHER; note = 2'-O-methyl modified nucleotide
  modified_base 47: mod_base = OTHER; note = 2'-O-methyl modified nucleotide
  modified_base 48: mod_base = OTHER; note = 2'-O-methyl modified nucleotide
  modified_base 51: mod_base = OTHER; note = 2'-O-methyl modified nucleotide
  modified_base 54: mod_base = OTHER; note = nucleotide with phosphorothioate linkage
  modified_base 58: mod_base = OTHER; note = 2'-O-methyl modified nucleotide
  modified_base 59: mod_base = OTHER; note = 2'-O-methyl modified nucleotide
  modified_base 61: mod_base = OTHER; note = 2'-O-methyl modified nucleotide
  modified_base 62: mod_base = OTHER; note = 2'-O-methyl modified nucleotide
  modified_base 63: mod_base = OTHER; note = 2'-O-methyl modified nucleotide
  modified_base 64: mod_base = OTHER; note = 2'-O-methyl modified nucleotide
  modified_base 65: mod_base = OTHER; note = 2'-O-methyl modified nucleotide
  modified_base 66: mod_base = OTHER; note = 2'-O-methyl modified nucleotide
  modified_base 67: mod_base = OTHER; note = 2'-O-methyl modified nucleotide
  modified_base 68: mod_base = OTHER; note = 2'-O-methyl modified nucleotide
  modified_base 69: mod_base = OTHER; note = 2'-O-methyl modified nucleotide
  modified_base 70: mod_base = OTHER; note = 2'-O-methyl modified nucleotide
  modified_base 75: mod_base = OTHER; note = 2'-O-methyl modified nucleotide
  modified_base 77: mod_base = OTHER; note = 2'-O-methyl modified nucleotide
  modified_base 80: mod_base = OTHER; note = 2'-O-methyl modified nucleotide
  modified_base 86: mod_base = OTHER; note = 2'-O-methyl modified nucleotide
  modified_base 87: mod_base = OTHER; note = 2'-O-methyl modified nucleotide
  modified_base 89: mod_base = OTHER; note = 2'-O-methyl modified nucleotide
  modified_base 90: mod_base = OTHER; note = 2'-O-methyl modified nucleotide
  modified_base 91: mod_base = OTHER; note = 2'-O-methyl modified nucleotide
  modified_base 92: mod_base = OTHER; note = 2'-O-methyl modified nucleotide
  modified_base 99: mod_base = OTHER; note = nucleotide with phosphorothioate linkage
  modified_base 100: mod_base = OTHER; note = 2'-O-methyl modified nucleotide with phosphorothioate linkage
  modified_base 101: mod_base = OTHER; note = 2'-O-methyl modified nucleotide

SEQ ID NO: 2173 - RNA, 101 nt, synthetic construct; identical to SEQ ID NO: 1173
  source 1..101: mol_type = other RNA
  modified_base 1: mod_base = OTHER; note = 2'-O-methyl modified nucleotide with phosphorothioate linkage
  modified_base 2: mod_base = OTHER; note = 2'-O-methyl modified nucleotide with phosphorothioate linkage
  modified_base 3: mod_base = OTHER; note = 2'-O-methyl modified nucleotide with phosphorothioate linkage
  modified_base 4: mod_base = OTHER; note = 2'-O-methyl modified nucleotide
  modified_base 5: mod_base = OTHER; note = 2'-O-methyl modified nucleotide
  modified_base 8: mod_base = OTHER; note = 2'-O-methyl modified nucleotide
  modified_base 9: mod_base = OTHER; note = 2'-O-methyl modified nucleotide
  modified_base 11: mod_base = OTHER; note = 2'-O-methyl modified nucleotide
  modified_base 13: mod_base = OTHER; note = 2'-O-methyl modified nucleotide
  modified_base 18: mod_base = OTHER; note = 2'-O-methyl modified nucleotide
  modified_base 22: mod_base = OTHER; note = 2'-O-methyl modified nucleotide
  modified_base 25: mod_base = OTHER; note = 2'-O-methyl modified nucleotide
  modified_base 29: mod_base = OTHER; note = 2'-O-methyl modified nucleotide
  modified_base 30: mod_base = OTHER; note = 2'-O-methyl modified nucleotide
  modified_base 31: mod_base = OTHER; note = 2'-O-methyl modified nucleotide
  modified_base 32: mod_base = OTHER; note = 2'-O-methyl modified nucleotide
  modified_base 37: mod_base = OTHER; note = 2'-O-methyl modified nucleotide
  modified_base 38: mod_base = OTHER; note = 2'-O-methyl modified nucleotide
  modified_base 39: mod_base = OTHER; note = 2'-O-methyl modified nucleotide
  modified_base 40: mod_base = OTHER; note = 2'-O-methyl modified nucleotide
  modified_base 41: mod_base = OTHER; note = 2'-O-methyl modified nucleotide
  modified_base 42: mod_base = OTHER; note = 2'-O-methyl modified nucleotide
  modified_base 43: mod_base = OTHER; note = 2'-O-methyl modified nucleotide
  modified_base 47: mod_base = OTHER; note = 2'-O-methyl modified nucleotide
  modified_base 48: mod_base = OTHER; note = 2'-O-methyl modified nucleotide
  modified_base 51: mod_base = OTHER; note = 2'-O-methyl modified nucleotide
  modified_base 54: mod_base = OTHER; note = nucleotide with phosphorothioate linkage
  modified_base 58: mod_base = OTHER; note = 2'-O-methyl modified nucleotide
  modified_base 59: mod_base = OTHER; note = 2'-O-methyl modified nucleotide
  modified_base 61: mod_base = OTHER; note = 2'-O-methyl modified nucleotide
  modified_base 62: mod_base = OTHER; note = 2'-O-methyl modified nucleotide
  modified_base 63: mod_base = OTHER; note = 2'-O-methyl modified nucleotide
  modified_base 64: mod_base = OTHER; note = 2'-O-methyl modified nucleotide
  modified_base 65: mod_base = OTHER; note = 2'-O-methyl modified nucleotide
  modified_base 66: mod_base = OTHER; note = 2'-O-methyl modified nucleotide
  modified_base 67: mod_base = OTHER; note = 2'-O-methyl modified nucleotide
  modified_base 68: mod_base = OTHER; note = 2'-O-methyl modified nucleotide
  modified_base 69: mod_base = OTHER; note = 2'-O-methyl modified nucleotide
  modified_base 70: mod_base = OTHER; note = 2'-O-methyl modified nucleotide
  modified_base 75: mod_base = OTHER; note = 2'-O-methyl modified nucleotide
  modified_base 77: mod_base = OTHER; note = 2'-O-methyl modified nucleotide
  modified_base 80: mod_base = OTHER; note = 2'-O-methyl modified nucleotide
  modified_base 86: mod_base = OTHER; note = 2'-O-methyl modified nucleotide
  modified_base 87: mod_base = OTHER; note = 2'-O-methyl modified nucleotide
  modified_base 89: mod_base = OTHER; note = 2'-O-methyl modified nucleotide
  modified_base 90: mod_base = OTHER; note = 2'-O-methyl modified nucleotide
  modified_base 91: mod_base = OTHER; note = 2'-O-methyl modified nucleotide
  modified_base 92: mod_base = OTHER; note = 2'-O-methyl modified nucleotide
  modified_base 99: mod_base = OTHER; note = nucleotide with phosphorothioate linkage
  modified_base 100: mod_base = OTHER; note = 2'-O-methyl modified nucleotide with phosphorothioate linkage
  modified_base 101: mod_base = OTHER; note = 2'-O-methyl modified nucleotide

SEQ ID NO: 2174 - RNA, 101 nt, synthetic construct; identical to SEQ ID NO: 1174
  source 1..101: mol_type = other RNA
  modified_base 1: mod_base = OTHER; note = 2'-O-methyl modified nucleotide with phosphorothioate linkage
  modified_base 2: mod_base = OTHER; note = 2'-O-methyl modified nucleotide with phosphorothioate linkage
  modified_base 3: mod_base = OTHER; note = 2'-O-methyl modified nucleotide with phosphorothioate linkage
  modified_base 4: mod_base = OTHER; note = 2'-O-methyl modified nucleotide
  modified_base 5: mod_base = OTHER; note = 2'-O-methyl modified nucleotide
  modified_base 8: mod_base = OTHER; note = 2'-O-methyl modified nucleotide
  modified_base 9: mod_base = OTHER; note = 2'-O-methyl modified nucleotide
  modified_base 11: mod_base = OTHER; note = 2'-O-methyl modified nucleotide
  modified_base 13: mod_base = OTHER; note = 2'-O-methyl modified nucleotide
  modified_base 18: mod_base = OTHER; note = 2'-O-methyl modified nucleotide
  modified_base 22: mod_base = OTHER; note = 2'-O-methyl modified nucleotide
  modified_base 25: mod_base = OTHER; note = 2'-O-methyl modified nucleotide
  modified_base 29: mod_base = OTHER; note = 2'-O-methyl modified nucleotide
  modified_base 30: mod_base = OTHER; note = 2'-O-methyl modified nucleotide
  modified_base 31: mod_base = OTHER; note = 2'-O-methyl modified nucleotide
  modified_base 32: mod_base = OTHER; note = 2'-O-methyl modified nucleotide
  modified_base 37: mod_base = OTHER; note = 2'-O-methyl modified nucleotide
  modified_base 38: mod_base = OTHER; note = 2'-O-methyl modified nucleotide
  modified_base 39: mod_base = OTHER; note = 2'-O-methyl modified nucleotide
  modified_base 40: mod_base = OTHER; note = 2'-O-methyl modified nucleotide
  modified_base 41: mod_base = OTHER; note = 2'-O-methyl modified nucleotide
  modified_base 42: mod_base = OTHER; note = 2'-O-methyl modified nucleotide
  modified_base 43: mod_base = OTHER; note = 2'-O-methyl modified nucleotide
  modified_base 47: mod_base = OTHER; note = 2'-O-methyl modified nucleotide
  modified_base 48: mod_base = OTHER; note = 2'-O-methyl modified nucleotide
  modified_base 51: mod_base = OTHER; note = 2'-O-methyl modified nucleotide
  modified_base 54: mod_base = OTHER; note = nucleotide with phosphorothioate linkage
  modified_base 58: mod_base = OTHER; note = 2'-O-methyl modified nucleotide
  modified_base 59: mod_base = OTHER; note = 2'-O-methyl modified nucleotide
  modified_base 61: mod_base = OTHER; note = 2'-O-methyl modified nucleotide
  modified_base 62: mod_base = OTHER; note = 2'-O-methyl modified nucleotide
  modified_base 63: mod_base = OTHER; note = 2'-O-methyl modified nucleotide
  modified_base 64: mod_base = OTHER; note = 2'-O-methyl modified nucleotide
  modified_base 65: mod_base = OTHER; note = 2'-O-methyl modified nucleotide
  modified_base 66: mod_base = OTHER; note = 2'-O-methyl modified nucleotide
  modified_base 67: mod_base = OTHER; note = 2'-O-methyl modified nucleotide
  modified_base 68: mod_base = OTHER; note = 2'-O-methyl modified nucleotide
  modified_base 69: mod_base = OTHER; note = 2'-O-methyl modified nucleotide
  modified_base 70: mod_base = OTHER; note = 2'-O-methyl modified nucleotide
  modified_base 75: mod_base = OTHER; note = 2'-O-methyl modified nucleotide
  modified_base 77: mod_base = OTHER; note = 2'-O-methyl modified nucleotide
  modified_base 80: mod_base = OTHER; note = 2'-O-methyl modified nucleotide
  modified_base 86: mod_base = OTHER; note = 2'-O-methyl modified nucleotide
  modified_base 87: mod_base = OTHER; note = 2'-O-methyl modified nucleotide
  modified_base 89: mod_base = OTHER; note = 2'-O-methyl modified nucleotide
  modified_base 90: mod_base = OTHER; note = 2'-O-methyl modified nucleotide
  modified_base 91: mod_base = OTHER; note = 2'-O-methyl modified nucleotide
  modified_base 92: mod_base = OTHER; note = 2'-O-methyl modified nucleotide
  modified_base 99: mod_base = OTHER; note = nucleotide with phosphorothioate linkage
  modified_base 100: mod_base = OTHER; note = 2'-O-methyl modified nucleotide with phosphorothioate linkage
  modified_base 101: mod_base = OTHER; note = 2'-O-methyl modified nucleotide

SEQ ID NO: 2175 - RNA, 101 nt, synthetic construct; identical to SEQ ID NO: 1175
  source 1..101: mol_type = other RNA
  modified_base 1: mod_base = OTHER; note = 2'-O-methyl modified nucleotide with phosphorothioate linkage
  modified_base 2: mod_base = OTHER; note = 2'-O-methyl modified nucleotide with phosphorothioate linkage
  modified_base 3: mod_base = OTHER; note = 2'-O-methyl modified nucleotide with phosphorothioate linkage
  modified_base 4: mod_base = OTHER; note = 2'-O-methyl modified nucleotide
  modified_base 5: mod_base = OTHER; note = 2'-O-methyl modified nucleotide
  modified_base 8: mod_base = OTHER; note = 2'-O-methyl modified nucleotide
  modified_base 9: mod_base = OTHER; note = 2'-O-methyl modified nucleotide
  modified_base 11: mod_base = OTHER; note = 2'-O-methyl modified nucleotide
  modified_base 13: mod_base = OTHER; note = 2'-O-methyl modified nucleotide
  modified_base 18: mod_base = OTHER; note = 2'-O-methyl modified nucleotide
  modified_base 22: mod_base = OTHER; note = 2'-O-methyl modified nucleotide
  modified_base 25: mod_base = OTHER; note = 2'-O-methyl modified nucleotide
  modified_base 29: mod_base = OTHER; note = 2'-O-methyl modified nucleotide
  modified_base 30: mod_base = OTHER; note = 2'-O-methyl modified nucleotide
  modified_base 31: mod_base = OTHER; note = 2'-O-methyl modified nucleotide
  modified_base 32: mod_base = OTHER; note = 2'-O-methyl modified nucleotide
  modified_base 37: mod_base = OTHER; note = 2'-O-methyl modified nucleotide
  modified_base 38: mod_base = OTHER; note = 2'-O-methyl modified nucleotide
  modified_base 39: mod_base = OTHER; note = 2'-O-methyl modified nucleotide
  modified_base 40: mod_base = OTHER; note = 2'-O-methyl modified nucleotide
  modified_base 41: mod_base = OTHER; note = 2'-O-methyl modified nucleotide
  modified_base 42: mod_base = OTHER; note = 2'-O-methyl modified nucleotide
  modified_base 43: mod_base = OTHER; note = 2'-O-methyl modified nucleotide
  modified_base 47: mod_base = OTHER; note = 2'-O-methyl modified nucleotide
  modified_base 48: mod_base = OTHER; note = 2'-O-methyl modified nucleotide
  modified_base 51: mod_base = OTHER; note = 2'-O-methyl modified nucleotide
  modified_base 54: mod_base = OTHER; note = nucleotide with phosphorothioate linkage
  modified_base 58: mod_base = OTHER; note = 2'-O-methyl modified nucleotide
  modified_base 59: mod_base = OTHER; note = 2'-O-methyl modified nucleotide
  modified_base 61: mod_base = OTHER; note = 2'-O-methyl modified nucleotide
  modified_base 62: mod_base = OTHER; note = 2'-O-methyl modified nucleotide
  modified_base 63: mod_base = OTHER; note = 2'-O-methyl modified nucleotide
  modified_base 64: mod_base = OTHER; note = 2'-O-methyl modified nucleotide
  modified_base 65: mod_base = OTHER; note = 2'-O-methyl modified nucleotide
  modified_base 66: mod_base = OTHER; note = 2'-O-methyl modified nucleotide
  modified_base 67: mod_base = OTHER; note = 2'-O-methyl modified nucleotide
  modified_base 68: mod_base = OTHER; note = 2'-O-methyl modified nucleotide
  modified_base 69: mod_base = OTHER; note = 2'-O-methyl modified nucleotide
  modified_base 70: mod_base = OTHER; note = 2'-O-methyl modified nucleotide
  modified_base 75: mod_base = OTHER; note = 2'-O-methyl modified nucleotide
  modified_base 77: mod_base = OTHER; note = 2'-O-methyl modified nucleotide
  modified_base 80: mod_base = OTHER; note = 2'-O-methyl modified nucleotide
  modified_base 86: mod_base = OTHER; note = 2'-O-methyl modified nucleotide
  modified_base 87: mod_base = OTHER; note = 2'-O-methyl modified nucleotide
  modified_base 89: mod_base = OTHER; note = 2'-O-methyl modified nucleotide
  modified_base 90: mod_base = OTHER; note = 2'-O-methyl modified nucleotide
  modified_base 91: mod_base = OTHER; note = 2'-O-methyl modified nucleotide
  modified_base 92: mod_base = OTHER; note = 2'-O-methyl modified nucleotide
  modified_base 99: mod_base = OTHER; note = nucleotide with phosphorothioate linkage
  modified_base 100: mod_base = OTHER; note = 2'-O-methyl modified nucleotide with phosphorothioate linkage
  modified_base 101: mod_base = OTHER; note = 2'-O-methyl modified nucleotide

SEQ ID NO: 2176 - RNA, 101 nt, synthetic construct; identical to SEQ ID NO: 1176
  source 1..101: mol_type = other RNA
  modified_base 1: mod_base = OTHER; note = 2'-O-methyl modified nucleotide with phosphorothioate linkage
  modified_base 2: mod_base = OTHER; note = 2'-O-methyl modified nucleotide with phosphorothioate linkage
  modified_base 3: mod_base = OTHER; note = 2'-O-methyl modified nucleotide with phosphorothioate linkage
  modified_base 4: mod_base = OTHER; note = 2'-O-methyl modified nucleotide
  modified_base 5: mod_base = OTHER; note = 2'-O-methyl modified nucleotide
  modified_base 8: mod_base = OTHER; note = 2'-O-methyl modified nucleotide
  modified_base 9: mod_base = OTHER; note = 2'-O-methyl modified nucleotide
  modified_base 11: mod_base = OTHER; note = 2'-O-methyl modified nucleotide
  modified_base 13: mod_base = OTHER; note = 2'-O-methyl modified nucleotide
  modified_base 18: mod_base = OTHER; note = 2'-O-methyl modified nucleotide
  modified_base 22: mod_base = OTHER; note = 2'-O-methyl modified nucleotide
  modified_base 25: mod_base = OTHER; note = 2'-O-methyl modified nucleotide
  modified_base 29: mod_base = OTHER; note = 2'-O-methyl modified nucleotide
  modified_base 30: mod_base = OTHER; note = 2'-O-methyl modified nucleotide
  modified_base 31: mod_base = OTHER; note = 2'-O-methyl modified nucleotide
  modified_base 32: mod_base = OTHER; note = 2'-O-methyl modified nucleotide
  modified_base 37: mod_base = OTHER; note = 2'-O-methyl modified nucleotide
  modified_base 38: mod_base = OTHER; note = 2'-O-methyl modified nucleotide
  modified_base 39: mod_base = OTHER; note = 2'-O-methyl modified nucleotide
  modified_base 40: mod_base = OTHER; note = 2'-O-methyl modified nucleotide
  modified_base 41: mod_base = OTHER; note = 2'-O-methyl modified nucleotide
  modified_base 42: mod_base = OTHER; note = 2'-O-methyl modified nucleotide
  modified_base 43: mod_base = OTHER; note = 2'-O-methyl modified nucleotide
  modified_base 47: mod_base = OTHER; note = 2'-O-methyl modified nucleotide
  modified_base 48: mod_base = OTHER; note = 2'-O-methyl modified nucleotide
  modified_base 51: mod_base = OTHER; note = 2'-O-methyl modified nucleotide
  modified_base 54: mod_base = OTHER; note = nucleotide with phosphorothioate linkage
  modified_base 58: mod_base = OTHER; note = 2'-O-methyl modified nucleotide
  modified_base 59: mod_base = OTHER; note = 2'-O-methyl modified nucleotide
  modified_base 61: mod_base = OTHER; note = 2'-O-methyl modified nucleotide
  modified_base 62: mod_base = OTHER; note = 2'-O-methyl modified nucleotide
  modified_base 63: mod_base = OTHER; note = 2'-O-methyl modified nucleotide
  modified_base 64: mod_base = OTHER; note = 2'-O-methyl modified nucleotide
  modified_base 65: mod_base = OTHER; note = 2'-O-methyl modified nucleotide
  modified_base 66: mod_base = OTHER; note = 2'-O-methyl modified nucleotide
  modified_base 67: mod_base = OTHER; note = 2'-O-methyl modified nucleotide
  modified_base 68: mod_base = OTHER; note = 2'-O-methyl modified nucleotide
  modified_base 69: mod_base = OTHER; note = 2'-O-methyl modified nucleotide
  modified_base 70: mod_base = OTHER; note = 2'-O-methyl modified nucleotide
  modified_base 75: mod_base = OTHER; note = 2'-O-methyl modified nucleotide
  modified_base 77: mod_base = OTHER; note = 2'-O-methyl modified nucleotide
  modified_base 80: mod_base = OTHER; note = 2'-O-methyl modified nucleotide
  modified_base 86: mod_base = OTHER; note = 2'-O-methyl modified nucleotide
  modified_base 87: mod_base = OTHER; note = 2'-O-methyl modified nucleotide
  modified_base 89: mod_base = OTHER; note = 2'-O-methyl modified nucleotide
  modified_base 90: mod_base = OTHER; note = 2'-O-methyl modified nucleotide
  modified_base 91: mod_base = OTHER; note = 2'-O-methyl modified nucleotide
  modified_base 92: mod_base = OTHER; note = 2'-O-methyl modified nucleotide
  modified_base 99: mod_base = OTHER; note = nucleotide with phosphorothioate linkage
  modified_base 100: mod_base = OTHER; note = 2'-O-methyl modified nucleotide with phosphorothioate linkage
  modified_base 101: mod_base = OTHER; note = 2'-O-methyl modified nucleotide

SEQ ID NO: 2177 - RNA, 101 nt, synthetic construct; identical to SEQ ID NO: 1177
  source 1..101: mol_type = other RNA
  modified_base 1: mod_base = OTHER; note = 2'-O-methyl modified nucleotide with phosphorothioate linkage
  modified_base 2: mod_base = OTHER; note = 2'-O-methyl modified nucleotide with phosphorothioate linkage
  modified_base 3: mod_base = OTHER; note = 2'-O-methyl modified nucleotide with phosphorothioate linkage
  modified_base 4: mod_base = OTHER; note = 2'-O-methyl modified nucleotide
  modified_base 5: mod_base = OTHER; note = 2'-O-methyl modified nucleotide
  modified_base 8: mod_base = OTHER; note = 2'-O-methyl modified nucleotide
  modified_base 9: mod_base = OTHER; note = 2'-O-methyl modified nucleotide
  modified_base 11: mod_base = OTHER; note = 2'-O-methyl modified nucleotide
  modified_base 13: mod_base = OTHER; note = 2'-O-methyl modified nucleotide
  modified_base 18: mod_base = OTHER; note = 2'-O-methyl modified nucleotide
  modified_base 22: mod_base = OTHER; note = 2'-O-methyl modified nucleotide
  modified_base 25: mod_base = OTHER; note = 2'-O-methyl modified nucleotide
  modified_base 29: mod_base = OTHER; note = 2'-O-methyl modified nucleotide
  modified_base 30: mod_base = OTHER; note = 2'-O-methyl modified nucleotide
  modified_base 31: mod_base = OTHER; note = 2'-O-methyl modified nucleotide
  modified_base 32: mod_base = OTHER; note = 2'-O-methyl modified nucleotide
  modified_base 37: mod_base = OTHER; note = 2'-O-methyl modified nucleotide
  modified_base 38: mod_base = OTHER; note = 2'-O-methyl modified nucleotide
  modified_base 39: mod_base = OTHER; note = 2'-O-methyl modified nucleotide
  modified_base 40: mod_base = OTHER; note = 2'-O-methyl modified nucleotide
  modified_base 41: mod_base = OTHER; note = 2'-O-methyl modified nucleotide
  modified_base 42: mod_base = OTHER; note = 2'-O-methyl modified nucleotide
  modified_base 43: mod_base = OTHER; note = 2'-O-methyl modified nucleotide
  modified_base 47: mod_base = OTHER; note = 2'-O-methyl modified nucleotide
  modified_base 48: mod_base = OTHER; note = 2'-O-methyl modified nucleotide
  modified_base 51: mod_base = OTHER; note = 2'-O-methyl modified nucleotide
  modified_base 54: mod_base = OTHER; note = nucleotide with phosphorothioate linkage
  modified_base 58: mod_base = OTHER; note = 2'-O-methyl modified nucleotide
  modified_base 59: mod_base = OTHER; note = 2'-O-methyl modified nucleotide
  modified_base 61: mod_base = OTHER; note = 2'-O-methyl modified nucleotide
  modified_base 62: mod_base = OTHER; note = 2'-O-methyl modified nucleotide
  modified_base 63: mod_base = OTHER; note = 2'-O-methyl modified nucleotide
  modified_base 64: mod_base = OTHER; note = 2'-O-methyl modified nucleotide
  modified_base 65: mod_base = OTHER; note = 2'-O-methyl modified nucleotide
  modified_base 66: mod_base = OTHER; note = 2'-O-methyl modified nucleotide
  modified_base 67: mod_base = OTHER; note = 2'-O-methyl modified nucleotide
  modified_base 68: mod_base = OTHER; note = 2'-O-methyl modified nucleotide
  modified_base 69: mod_base = OTHER; note = 2'-O-methyl modified nucleotide
  modified_base 70: mod_base = OTHER; note = 2'-O-methyl modified nucleotide
  modified_base 75: mod_base = OTHER; note = 2'-O-methyl modified nucleotide
  modified_base 77: mod_base = OTHER; note = 2'-O-methyl modified nucleotide
  modified_base 80: mod_base = OTHER; note = 2'-O-methyl modified nucleotide
  modified_base 86: mod_base = OTHER; note = 2'-O-methyl modified nucleotide
  modified_base 87: mod_base = OTHER; note = 2'-O-methyl modified nucleotide
  modified_base 89: mod_base = OTHER; note = 2'-O-methyl modified nucleotide
  modified_base 90: mod_base = OTHER; note = 2'-O-methyl modified nucleotide
  modified_base 91: mod_base = OTHER; note = 2'-O-methyl modified nucleotide
  modified_base 92: mod_base = OTHER; note = 2'-O-methyl modified nucleotide
  modified_base 99: mod_base = OTHER; note = nucleotide with phosphorothioate linkage
  modified_base 100: mod_base = OTHER; note = 2'-O-methyl modified nucleotide with phosphorothioate linkage
  modified_base 101: mod_base = OTHER; note = 2'-O-methyl modified nucleotide

SEQ ID NO: 2178 - RNA, 101 nt, synthetic construct; identical to SEQ ID NO: 1178
  source 1..101: mol_type = other RNA
  modified_base 1: mod_base = OTHER; note = 2'-O-methyl modified nucleotide with phosphorothioate linkage
  modified_base 2: mod_base = OTHER; note = 2'-O-methyl modified nucleotide with phosphorothioate linkage
  modified_base 3: mod_base = OTHER; note = 2'-O-methyl modified nucleotide with phosphorothioate linkage
  modified_base 4: mod_base = OTHER; note = 2'-O-methyl modified nucleotide
  modified_base 5: mod_base = OTHER; note = 2'-O-methyl modified nucleotide
  modified_base 8: mod_base = OTHER; note = 2'-O-methyl modified nucleotide
  modified_base 9: mod_base = OTHER; note = 2'-O-methyl modified nucleotide
  modified_base 11: mod_base = OTHER; note = 2'-O-methyl modified nucleotide
  modified_base 13: mod_base = OTHER; note = 2'-O-methyl modified nucleotide
  modified_base 18: mod_base = OTHER; note = 2'-O-methyl modified nucleotide
  modified_base 22: mod_base = OTHER; note = 2'-O-methyl modified nucleotide
  modified_base 25: mod_base = OTHER; note = 2'-O-methyl modified nucleotide
  modified_base 29: mod_base = OTHER; note = 2'-O-methyl modified nucleotide
  modified_base 30: mod_base = OTHER; note = 2'-O-methyl modified nucleotide
  modified_base 31: mod_base = OTHER; note = 2'-O-methyl modified nucleotide
  modified_base 32: mod_base = OTHER; note = 2'-O-methyl modified nucleotide
  modified_base 37: mod_base = OTHER; note = 2'-O-methyl modified nucleotide
  modified_base 38: mod_base = OTHER; note = 2'-O-methyl modified nucleotide
  modified_base 39: mod_base = OTHER; note = 2'-O-methyl modified nucleotide
  modified_base 40: mod_base = OTHER; note = 2'-O-methyl modified nucleotide
  modified_base 41: mod_base = OTHER; note = 2'-O-methyl modified nucleotide
  modified_base 42: mod_base = OTHER; note = 2'-O-methyl modified nucleotide
  modified_base 43: mod_base = OTHER; note = 2'-O-methyl modified nucleotide
  modified_base 47: mod_base = OTHER; note = 2'-O-methyl modified nucleotide
  modified_base 48: mod_base = OTHER; note = 2'-O-methyl modified nucleotide
  modified_base 51: mod_base = OTHER; note = 2'-O-methyl modified nucleotide
  modified_base 54: mod_base = OTHER; note = nucleotide with phosphorothioate linkage
  modified_base 58: mod_base = OTHER; note = 2'-O-methyl modified nucleotide
  modified_base 59: mod_base = OTHER; note = 2'-O-methyl modified nucleotide
  modified_base 61: mod_base = OTHER; note = 2'-O-methyl modified nucleotide
  modified_base 62: mod_base = OTHER; note = 2'-O-methyl modified nucleotide
  modified_base 63: mod_base = OTHER; note = 2'-O-methyl modified nucleotide
  modified_base 64: mod_base = OTHER; note = 2'-O-methyl modified nucleotide
  modified_base 65: mod_base = OTHER; note = 2'-O-methyl modified nucleotide
  modified_base 66: mod_base = OTHER; note = 2'-O-methyl modified nucleotide
  modified_base 67: mod_base = OTHER; note = 2'-O-methyl modified nucleotide
  modified_base 68: mod_base = OTHER; note = 2'-O-methyl modified nucleotide
  modified_base 69: mod_base = OTHER; note = 2'-O-methyl modified nucleotide
  modified_base 70: mod_base = OTHER; note = 2'-O-methyl modified nucleotide
  modified_base 75: mod_base = OTHER; note = 2'-O-methyl modified nucleotide
  modified_base 77: mod_base = OTHER; note = 2'-O-methyl modified nucleotide
  modified_base 80: mod_base = OTHER; note = 2'-O-methyl modified nucleotide
  modified_base 86: mod_base = OTHER; note = 2'-O-methyl modified nucleotide
  modified_base 87: mod_base = OTHER; note = 2'-O-methyl modified nucleotide
  modified_base 89: mod_base = OTHER; note = 2'-O-methyl modified nucleotide
  modified_base 90: mod_base = OTHER; note = 2'-O-methyl modified nucleotide
  modified_base 91: mod_base = OTHER; note = 2'-O-methyl modified nucleotide
  modified_base 92: mod_base = OTHER; note = 2'-O-methyl modified nucleotide
  modified_base 99: mod_base = OTHER; note = nucleotide with phosphorothioate linkage
  modified_base 100: mod_base = OTHER; note = 2'-O-methyl modified nucleotide with phosphorothioate linkage
  modified_base 101: mod_base = OTHER; note = 2'-O-methyl modified nucleotide

SEQ ID NO: 2179 - RNA, 101 nt, synthetic construct; identical to SEQ ID NO: 1179
  source 1..101: mol_type = other RNA
  modified_base 1: mod_base = OTHER; note = 2'-O-methyl modified nucleotide with phosphorothioate linkage
  modified_base 2: mod_base = OTHER; note = 2'-O-methyl modified nucleotide with phosphorothioate linkage
  modified_base 3: mod_base = OTHER; note = 2'-O-methyl modified nucleotide with phosphorothioate linkage
  modified_base 4: mod_base = OTHER; note = 2'-O-methyl modified nucleotide
  modified_base 5: mod_base = OTHER; note = 2'-O-methyl modified nucleotide
  modified_base 8: mod_base = OTHER; note = 2'-O-methyl modified nucleotide
  modified_base 9: mod_base = OTHER; note = 2'-O-methyl modified nucleotide
  modified_base 11: mod_base = OTHER; note = 2'-O-methyl modified nucleotide
  modified_base 13: mod_base = OTHER; note = 2'-O-methyl modified nucleotide
  modified_base 18: mod_base = OTHER; note = 2'-O-methyl modified nucleotide
  modified_base 22: mod_base = OTHER; note = 2'-O-methyl modified nucleotide
  modified_base 25: mod_base = OTHER; note = 2'-O-methyl modified nucleotide
  modified_base 29: mod_base = OTHER; note = 2'-O-methyl modified nucleotide
  modified_base 30: mod_base = OTHER; note = 2'-O-methyl modified nucleotide
  modified_base 31: mod_base = OTHER; note = 2'-O-methyl modified nucleotide
  modified_base 32: mod_base = OTHER; note = 2'-O-methyl modified nucleotide
  modified_base 37: mod_base = OTHER; note = 2'-O-methyl modified nucleotide
  modified_base 38: mod_base = OTHER; note = 2'-O-methyl modified nucleotide
  modified_base 39: mod_base = OTHER; note = 2'-O-methyl modified nucleotide
  modified_base 40: mod_base = OTHER; note = 2'-O-methyl modified nucleotide
  modified_base 41: mod_base = OTHER; note = 2'-O-methyl modified nucleotide
  modified_base 42: mod_base = OTHER; note = 2'-O-methyl modified nucleotide
  modified_base 43: mod_base = OTHER; note = 2'-O-methyl modified nucleotide
  modified_base 47: mod_base = OTHER; note = 2'-O-methyl modified nucleotide
  modified_base 48: mod_base = OTHER; note = 2'-O-methyl modified nucleotide
  modified_base 51: mod_base = OTHER; note = 2'-O-methyl modified nucleotide
  modified_base 54: mod_base = OTHER; note = nucleotide with phosphorothioate linkage
  modified_base 58: mod_base = OTHER; note = 2'-O-methyl modified nucleotide
  modified_base 59: mod_base = OTHER; note = 2'-O-methyl modified nucleotide
  modified_base 61: mod_base = OTHER; note = 2'-O-methyl modified nucleotide
  modified_base 62: mod_base = OTHER; note = 2'-O-methyl modified nucleotide
  modified_base 63: mod_base = OTHER; note = 2'-O-methyl modified nucleotide
  modified_base 64: mod_base = OTHER; note = 2'-O-methyl modified nucleotide
  modified_base 65: mod_base = OTHER; note = 2'-O-methyl modified nucleotide
  modified_base 66: mod_base = OTHER; note = 2'-O-methyl modified nucleotide
  modified_base 67: mod_base = OTHER; note = 2'-O-methyl modified nucleotide
  modified_base 68: mod_base = OTHER; note = 2'-O-methyl modified nucleotide
  modified_base 69: mod_base = OTHER; note = 2'-O-methyl modified nucleotide
  modified_base 70: mod_base = OTHER; note = 2'-O-methyl modified nucleotide
  modified_base 75: mod_base = OTHER; note = 2'-O-methyl modified nucleotide
  modified_base 77: mod_base = OTHER; note = 2'-O-methyl modified nucleotide
  modified_base 80: mod_base = OTHER; note = 2'-O-methyl modified nucleotide
  modified_base 86: mod_base = OTHER; note = 2'-O-methyl modified nucleotide
  modified_base 87: mod_base = OTHER; note = 2'-O-methyl modified nucleotide
  modified_base 89: mod_base = OTHER; note = 2'-O-methyl modified nucleotide
  modified_base 90: mod_base = OTHER; note = 2'-O-methyl modified nucleotide
  modified_base 91: mod_base = OTHER; note = 2'-O-methyl modified nucleotide
  modified_base 92: mod_base = OTHER; note = 2'-O-methyl modified nucleotide
  modified_base 99: mod_base = OTHER; note = nucleotide with phosphorothioate linkage
  modified_base 100: mod_base = OTHER; note = 2'-O-methyl modified nucleotide with phosphorothioate linkage
  modified_base 101: mod_base = OTHER; note = 2'-O-methyl modified nucleotide

SEQ ID NO: 2180 - RNA, 101 nt, synthetic construct; identical to SEQ ID NO: 1180
  source 1..101: mol_type = other RNA
  modified_base 1: mod_base = OTHER; note = 2'-O-methyl modified nucleotide with phosphorothioate linkage
  modified_base 2: mod_base = OTHER; note = 2'-O-methyl modified nucleotide with phosphorothioate linkage
  modified_base 3: mod_base = OTHER; note = 2'-O-methyl modified nucleotide with phosphorothioate linkage
  modified_base 4: mod_base = OTHER; note = 2'-O-methyl modified nucleotide
  modified_base 5: mod_base = OTHER; note = 2'-O-methyl modified nucleotide
  modified_base 8: mod_base = OTHER; note = 2'-O-methyl modified nucleotide
  modified_base 9: mod_base = OTHER; note = 2'-O-methyl modified nucleotide
  modified_base 11: mod_base = OTHER; note = 2'-O-methyl modified nucleotide
  modified_base 13: mod_base = OTHER; note = 2'-O-methyl modified nucleotide
  modified_base 18: mod_base = OTHER; note = 2'-O-methyl modified nucleotide
  modified_base 22: mod_base = OTHER; note = 2'-O-methyl modified nucleotide
  modified_base 25: mod_base = OTHER; note = 2'-O-methyl modified nucleotide
  modified_base 29: mod_base = OTHER; note = 2'-O-methyl modified nucleotide
  modified_base 30: mod_base = OTHER; note = 2'-O-methyl modified nucleotide
  modified_base 31: mod_base = OTHER; note = 2'-O-methyl modified nucleotide
  modified_base 32: mod_base = OTHER; note = 2'-O-methyl modified nucleotide
  modified_base 37: mod_base = OTHER; note = 2'-O-methyl modified nucleotide
  modified_base 38: mod_base = OTHER; note = 2'-O-methyl modified nucleotide
  modified_base 39: mod_base = OTHER; note = 2'-O-methyl modified nucleotide
  modified_base 40: mod_base = OTHER; note = 2'-O-methyl modified nucleotide
  modified_base 41: mod_base = OTHER; note = 2'-O-methyl modified nucleotide
  modified_base 42: mod_base = OTHER; note = 2'-O-methyl modified nucleotide
  modified_base 43: mod_base = OTHER; note = 2'-O-methyl modified nucleotide
  modified_base 47: mod_base = OTHER; note = 2'-O-methyl modified nucleotide
  modified_base 48: mod_base = OTHER; note = 2'-O-methyl modified nucleotide
  modified_base 51: mod_base = OTHER; note = 2'-O-methyl modified nucleotide
  modified_base 54: mod_base = OTHER; note = nucleotide with phosphorothioate linkage
  modified_base 58: mod_base = OTHER; note = 2'-O-methyl modified nucleotide
  modified_base 59: mod_base = OTHER; note = 2'-O-methyl modified nucleotide
  modified_base 61: mod_base = OTHER; note = 2'-O-methyl modified nucleotide
  modified_base 62: mod_base = OTHER; note = 2'-O-methyl modified nucleotide
  modified_base 63: mod_base = OTHER; note = 2'-O-methyl modified nucleotide
  modified_base 64: mod_base = OTHER; note = 2'-O-methyl modified nucleotide
  modified_base 65: mod_base = OTHER; note = 2'-O-methyl modified nucleotide
  modified_base 66: mod_base = OTHER; note = 2'-O-methyl modified nucleotide
  modified_base 67: mod_base = OTHER; note = 2'-O-methyl modified nucleotide
  modified_base 68: mod_base = OTHER; note = 2'-O-methyl modified nucleotide
  modified_base 69: mod_base = OTHER; note = 2'-O-methyl modified nucleotide
  modified_base 70: mod_base = OTHER; note = 2'-O-methyl modified nucleotide
  modified_base 75: mod_base = OTHER; note = 2'-O-methyl modified nucleotide
  modified_base 77: mod_base = OTHER; note = 2'-O-methyl modified nucleotide
  modified_base 80: mod_base = OTHER; note = 2'-O-methyl modified nucleotide
  modified_base 86: mod_base = OTHER; note = 2'-O-methyl modified nucleotide
  modified_base 87: mod_base = OTHER; note = 2'-O-methyl modified nucleotide
  modified_base 89: mod_base = OTHER; note = 2'-O-methyl modified nucleotide
  modified_base 90: mod_base = OTHER; note = 2'-O-methyl modified nucleotide
  modified_base 91: mod_base = OTHER; note = 2'-O-methyl modified nucleotide
  modified_base 92: mod_base = OTHER; note = 2'-O-methyl modified nucleotide
  modified_base 99: mod_base = OTHER; note = nucleotide with phosphorothioate linkage
  modified_base 100: mod_base = OTHER; note = 2'-O-methyl modified nucleotide with phosphorothioate linkage
  modified_base 101: mod_base = OTHER; note = 2'-O-methyl modified nucleotide

SEQ ID NO: 2181 - RNA, 101 nt, synthetic construct; identical to SEQ ID NO: 1181
  source 1..101: mol_type = other RNA
  modified_base 1: mod_base = OTHER; note = 2'-O-methyl modified nucleotide with phosphorothioate linkage
  modified_base 2: mod_base = OTHER; note = 2'-O-methyl modified nucleotide with phosphorothioate linkage
  modified_base 3: mod_base = OTHER; note = 2'-O-methyl modified nucleotide with phosphorothioate linkage
  modified_base 4: mod_base = OTHER; note = 2'-O-methyl modified nucleotide
  modified_base 5: mod_base = OTHER; note = 2'-O-methyl modified nucleotide
  modified_base 8: mod_base = OTHER; note = 2'-O-methyl modified nucleotide
  modified_base 9: mod_base = OTHER; note = 2'-O-methyl modified nucleotide
  modified_base 11: mod_base = OTHER; note = 2'-O-methyl modified nucleotide
  modified_base 13: mod_base = OTHER; note = 2'-O-methyl modified nucleotide
  modified_base 18: mod_base = OTHER; note = 2'-O-methyl modified nucleotide
  modified_base 22: mod_base = OTHER; note = 2'-O-methyl modified nucleotide
  modified_base 25: mod_base = OTHER; note = 2'-O-methyl modified nucleotide
  modified_base 29: mod_base = OTHER; note = 2'-O-methyl modified nucleotide
  modified_base 30: mod_base = OTHER; note = 2'-O-methyl modified nucleotide
  modified_base 31: mod_base = OTHER; note = 2'-O-methyl modified nucleotide
  modified_base 32: mod_base = OTHER; note = 2'-O-methyl modified nucleotide
  modified_base 37: mod_base = OTHER; note = 2'-O-methyl modified nucleotide
  modified_base 38: mod_base = OTHER; note = 2'-O-methyl modified nucleotide
  modified_base 39: mod_base = OTHER; note = 2'-O-methyl modified nucleotide
  modified_base 40: mod_base = OTHER; note = 2'-O-methyl modified nucleotide
  modified_base 41: mod_base = OTHER; note = 2'-O-methyl modified nucleotide
  modified_base 42: mod_base = OTHER; note = 2'-O-methyl modified nucleotide
  modified_base 43: mod_base = OTHER; note = 2'-O-methyl modified nucleotide
  modified_base 47: mod_base = OTHER; note = 2'-O-methyl modified nucleotide
  modified_base 48: mod_base = OTHER; note = 2'-O-methyl modified nucleotide
  modified_base 51: mod_base = OTHER; note = 2'-O-methyl modified nucleotide
  modified_base 54: mod_base = OTHER; note = nucleotide with phosphorothioate linkage
  modified_base 58: mod_base = OTHER; note = 2'-O-methyl modified nucleotide
  modified_base 59: mod_base = OTHER; note = 2'-O-methyl modified nucleotide
  modified_base 61: mod_base = OTHER; note = 2'-O-methyl modified nucleotide
  modified_base 62: mod_base = OTHER; note = 2'-O-methyl modified nucleotide
  modified_base 63: mod_base = OTHER; note = 2'-O-methyl modified nucleotide
  modified_base 64: mod_base = OTHER; note = 2'-O-methyl modified nucleotide
  modified_base 65: mod_base = OTHER; note = 2'-O-methyl modified nucleotide
  modified_base 66: mod_base = OTHER; note = 2'-O-methyl modified nucleotide
  modified_base 67: mod_base = OTHER; note = 2'-O-methyl modified nucleotide
  modified_base 68: mod_base = OTHER; note = 2'-O-methyl modified nucleotide
  modified_base 69: mod_base = OTHER; note = 2'-O-methyl modified nucleotide
  modified_base 70: mod_base = OTHER; note = 2'-O-methyl modified nucleotide
  modified_base 75: mod_base = OTHER; note = 2'-O-methyl modified nucleotide
  modified_base 77: mod_base = OTHER; note = 2'-O-methyl modified nucleotide
  modified_base 80: mod_base = OTHER; note = 2'-O-methyl modified nucleotide
  modified_base 86: mod_base = OTHER; note = 2'-O-methyl modified nucleotide
  modified_base 87: mod_base = OTHER; note = 2'-O-methyl modified nucleotide
  modified_base 89: mod_base = OTHER; note = 2'-O-methyl modified nucleotide
  modified_base 90: mod_base = OTHER; note = 2'-O-methyl modified nucleotide
  modified_base 91: mod_base = OTHER; note = 2'-O-methyl modified nucleotide
  modified_base 92: mod_base = OTHER; note = 2'-O-methyl modified nucleotide
  modified_base 99: mod_base = OTHER; note = nucleotide with phosphorothioate linkage
  modified_base 100: mod_base = OTHER; note = 2'-O-methyl modified nucleotide with phosphorothioate linkage
  modified_base 101: mod_base = OTHER; note = 2'-O-methyl modified nucleotide

SEQ ID NO: 2182 - RNA, 101 nt, synthetic construct; identical to SEQ ID NO: 1182
  source 1..101: mol_type = other RNA
  modified_base 1: mod_base = OTHER; note = 2'-O-methyl modified nucleotide with phosphorothioate linkage
  modified_base 2: mod_base = OTHER; note = 2'-O-methyl modified nucleotide with phosphorothioate linkage
  modified_base 3: mod_base = OTHER; note = 2'-O-methyl modified nucleotide with phosphorothioate linkage
  modified_base 4: mod_base = OTHER; note = 2'-O-methyl modified nucleotide
  modified_base 5: mod_base = OTHER; note = 2'-O-methyl modified nucleotide
  modified_base 8: mod_base = OTHER; note = 2'-O-methyl modified nucleotide
  modified_base 9: mod_base = OTHER; note = 2'-O-methyl modified nucleotide
  modified_base 11: mod_base = OTHER; note = 2'-O-methyl modified nucleotide
  modified_base 13: mod_base = OTHER; note = 2'-O-methyl modified nucleotide
  modified_base 18: mod_base = OTHER; note = 2'-O-methyl modified nucleotide
  modified_base 22: mod_base = OTHER; note = 2'-O-methyl modified nucleotide
  modified_base 25: mod_base = OTHER; note = 2'-O-methyl modified nucleotide
  modified_base 29: mod_base = OTHER; note = 2'-O-methyl modified nucleotide
  modified_base 30: mod_base = OTHER; note = 2'-O-methyl modified nucleotide
  modified_base 31: mod_base = OTHER; note = 2'-O-methyl modified nucleotide
  modified_base 32: mod_base = OTHER; note = 2'-O-methyl modified nucleotide
  modified_base 37: mod_base = OTHER; note = 2'-O-methyl modified nucleotide
  modified_base 38: mod_base = OTHER; note = 2'-O-methyl modified nucleotide
  modified_base 39: mod_base = OTHER; note = 2'-O-methyl modified nucleotide
  modified_base 40: mod_base = OTHER; note = 2'-O-methyl modified nucleotide
  modified_base 41: mod_base = OTHER; note = 2'-O-methyl modified nucleotide
  modified_base 42: mod_base = OTHER; note = 2'-O-methyl modified nucleotide
  modified_base 43: mod_base = OTHER; note = 2'-O-methyl modified nucleotide
  modified_base 47: mod_base = OTHER; note = 2'-O-methyl modified nucleotide
  modified_base 48: mod_base = OTHER; note = 2'-O-methyl modified nucleotide
  modified_base 51: mod_base = OTHER; note = 2'-O-methyl modified nucleotide
  modified_base 54: mod_base = OTHER; note = nucleotide with phosphorothioate linkage
  modified_base 58: mod_base = OTHER; note = 2'-O-methyl modified nucleotide
  modified_base 59: mod_base = OTHER; note = 2'-O-methyl modified nucleotide
  modified_base 61: mod_base = OTHER; note = 2'-O-methyl modified nucleotide
  modified_base 62: mod_base = OTHER; note = 2'-O-methyl modified nucleotide
  modified_base 63: mod_base = OTHER; note = 2'-O-methyl modified nucleotide
  modified_base 64: mod_base = OTHER; note = 2'-O-methyl modified nucleotide
  modified_base 65: mod_base = OTHER; note = 2'-O-methyl modified nucleotide
  modified_base 66: mod_base = OTHER; note = 2'-O-methyl modified nucleotide
  modified_base 67: mod_base = OTHER; note = 2'-O-methyl modified nucleotide
  modified_base 68: mod_base = OTHER; note = 2'-O-methyl modified nucleotide
  modified_base 69: mod_base = OTHER; note = 2'-O-methyl modified nucleotide
  modified_base 70: mod_base = OTHER; note = 2'-O-methyl modified nucleotide
  modified_base 75: mod_base = OTHER; note = 2'-O-methyl modified nucleotide
  modified_base 77: mod_base = OTHER; note = 2'-O-methyl modified nucleotide
  modified_base 80: mod_base = OTHER; note = 2'-O-methyl modified nucleotide
  modified_base 86: mod_base = OTHER; note = 2'-O-methyl modified nucleotide
  modified_base 87: mod_base = OTHER; note = 2'-O-methyl modified nucleotide
  modified_base 89: mod_base = OTHER; note = 2'-O-methyl modified nucleotide
  modified_base 90: mod_base = OTHER; note = 2'-O-methyl modified nucleotide
  modified_base 91: mod_base = OTHER; note = 2'-O-methyl modified nucleotide
  modified_base 92: mod_base = OTHER; note = 2'-O-methyl modified nucleotide
  modified_base 99: mod_base = OTHER; note = nucleotide with phosphorothioate linkage
  modified_base 100: mod_base = OTHER; note = 2'-O-methyl modified nucleotide with phosphorothioate linkage
  modified_base 101: mod_base = OTHER; note = 2'-O-methyl modified nucleotide

SEQ ID NO: 2183 - RNA, 101 nt, synthetic construct; identical to SEQ ID NO: 1183
  source 1..101: mol_type = other RNA
  modified_base 1: mod_base = OTHER; note = 2'-O-methyl modified nucleotide with phosphorothioate linkage
  modified_base 2: mod_base = OTHER; note = 2'-O-methyl modified nucleotide with phosphorothioate linkage
  modified_base 3: mod_base = OTHER; note = 2'-O-methyl modified nucleotide with phosphorothioate linkage
  modified_base 4: mod_base = OTHER; note = 2'-O-methyl modified nucleotide
  modified_base 5: mod_base = OTHER; note = 2'-O-methyl modified nucleotide
  modified_base 8: mod_base = OTHER; note = 2'-O-methyl modified nucleotide
  modified_base 9: mod_base = OTHER; note = 2'-O-methyl modified nucleotide
  modified_base 11: mod_base = OTHER; note = 2'-O-methyl modified nucleotide
  modified_base 13: mod_base = OTHER; note = 2'-O-methyl modified nucleotide
  modified_base 18: mod_base = OTHER; note = 2'-O-methyl modified nucleotide
  modified_base 22: mod_base = OTHER; note = 2'-O-methyl modified nucleotide
  modified_base 25: mod_base = OTHER; note = 2'-O-methyl modified nucleotide
  modified_base 29: mod_base = OTHER; note = 2'-O-methyl modified nucleotide
  modified_base 30: mod_base = OTHER; note = 2'-O-methyl modified nucleotide
  modified_base 31: mod_base = OTHER; note = 2'-O-methyl modified nucleotide
  modified_base 32: mod_base = OTHER; note = 2'-O-methyl modified nucleotide
  modified_base 37: mod_base = OTHER; note = 2'-O-methyl modified nucleotide
  modified_base 38: mod_base = OTHER; note = 2'-O-methyl modified nucleotide
  modified_base 39: mod_base = OTHER; note = 2'-O-methyl modified nucleotide
  modified_base 40: mod_base = OTHER; note = 2'-O-methyl modified nucleotide
  modified_base 41: mod_base = OTHER; note = 2'-O-methyl modified nucleotide
  modified_base 42: mod_base = OTHER; note = 2'-O-methyl modified nucleotide
  modified_base 43: mod_base = OTHER; note = 2'-O-methyl modified nucleotide
  modified_base 47: mod_base = OTHER; note = 2'-O-methyl modified nucleotide
  modified_base 48: mod_base = OTHER; note = 2'-O-methyl modified nucleotide
  modified_base 51: mod_base = OTHER; note = 2'-O-methyl modified nucleotide
  modified_base 54: mod_base = OTHER; note = nucleotide with phosphorothioate linkage
  modified_base 58: mod_base = OTHER; note = 2'-O-methyl modified nucleotide
  modified_base 59: mod_base = OTHER; note = 2'-O-methyl modified nucleotide
  modified_base 61: mod_base = OTHER; note = 2'-O-methyl modified nucleotide
  modified_base 62: mod_base = OTHER; note = 2'-O-methyl modified nucleotide
  modified_base 63: mod_base = OTHER; note = 2'-O-methyl modified nucleotide
  modified_base 64: mod_base = OTHER; note = 2'-O-methyl modified nucleotide
  modified_base 65: mod_base = OTHER; note = 2'-O-methyl modified nucleotide
  modified_base 66: mod_base = OTHER; note = 2'-O-methyl modified nucleotide
  modified_base 67: mod_base = OTHER; note = 2'-O-methyl modified nucleotide
  modified_base 68: mod_base = OTHER; note = 2'-O-methyl modified nucleotide
  modified_base 69: mod_base = OTHER; note = 2'-O-methyl modified nucleotide
  modified_base 70: mod_base = OTHER; note = 2'-O-methyl modified nucleotide
  modified_base 75: mod_base = OTHER; note = 2'-O-methyl modified nucleotide
  modified_base 77: mod_base = OTHER; note = 2'-O-methyl modified nucleotide
  modified_base 80: mod_base = OTHER; note = 2'-O-methyl modified nucleotide
  modified_base 86: mod_base = OTHER; note = 2'-O-methyl modified nucleotide
  modified_base 87: mod_base = OTHER; note = 2'-O-methyl modified nucleotide
  modified_base 89: mod_base = OTHER; note = 2'-O-methyl modified nucleotide
  modified_base 90: mod_base = OTHER; note = 2'-O-methyl modified nucleotide
  modified_base 91: mod_base = OTHER; note = 2'-O-methyl modified nucleotide
  modified_base 92: mod_base = OTHER; note = 2'-O-methyl modified nucleotide
  modified_base 99: mod_base = OTHER; note = nucleotide with phosphorothioate linkage
  modified_base 100: mod_base = OTHER; note = 2'-O-methyl modified nucleotide with phosphorothioate linkage
  modified_base 101: mod_base = OTHER; note = 2'-O-methyl modified nucleotide

SEQ ID NO: 2184 - RNA, 101 nt, synthetic construct; identical to SEQ ID NO: 1184
  source 1..101: mol_type = other RNA
  modified_base 1: mod_base = OTHER; note = 2'-O-methyl modified nucleotide with phosphorothioate linkage
  modified_base 2: mod_base = OTHER; note = 2'-O-methyl modified nucleotide with phosphorothioate linkage
  modified_base 3: mod_base = OTHER; note = 2'-O-methyl modified nucleotide with phosphorothioate linkage
  modified_base 4: mod_base = OTHER; note = 2'-O-methyl modified nucleotide
  modified_base 5: mod_base = OTHER; note = 2'-O-methyl modified nucleotide
  modified_base 8: mod_base = OTHER; note = 2'-O-methyl modified nucleotide
  modified_base 9: mod_base = OTHER; note = 2'-O-methyl modified nucleotide
  modified_base 11: mod_base = OTHER; note = 2'-O-methyl modified nucleotide
  modified_base 13: mod_base = OTHER; note = 2'-O-methyl modified nucleotide
  modified_base 18: mod_base = OTHER; note = 2'-O-methyl modified nucleotide
  modified_base 22: mod_base = OTHER; note = 2'-O-methyl modified nucleotide
  modified_base 25: mod_base = OTHER; note = 2'-O-methyl modified nucleotide
  modified_base 29: mod_base = OTHER; note = 2'-O-methyl modified nucleotide
  modified_base 30: mod_base = OTHER; note = 2'-O-methyl modified nucleotide
  modified_base 31: mod_base = OTHER; note = 2'-O-methyl modified nucleotide
  modified_base 32: mod_base = OTHER; note = 2'-O-methyl modified nucleotide
  modified_base 37: mod_base = OTHER; note = 2'-O-methyl modified nucleotide
  modified_base 38: mod_base = OTHER; note = 2'-O-methyl modified nucleotide
  modified_base 39: mod_base = OTHER; note = 2'-O-methyl modified nucleotide
  modified_base 40: mod_base = OTHER; note = 2'-O-methyl modified nucleotide
  modified_base 41: mod_base = OTHER; note = 2'-O-methyl modified nucleotide
  modified_base 42: mod_base = OTHER; note = 2'-O-methyl modified nucleotide
  modified_base 43: mod_base = OTHER; note = 2'-O-methyl modified nucleotide
  modified_base 47: mod_base = OTHER; note = 2'-O-methyl modified nucleotide
  modified_base 48: mod_base = OTHER; note = 2'-O-methyl modified nucleotide
  modified_base 51: mod_base = OTHER; note = 2'-O-methyl modified nucleotide
  modified_base 54: mod_base = OTHER; note = nucleotide with phosphorothioate linkage
  modified_base 58: mod_base = OTHER; note = 2'-O-methyl modified nucleotide
  modified_base 59: mod_base = OTHER; note = 2'-O-methyl modified nucleotide
  modified_base 61: mod_base = OTHER; note = 2'-O-methyl modified nucleotide
  modified_base 62: mod_base = OTHER; note = 2'-O-methyl modified nucleotide
  modified_base 63: mod_base = OTHER; note = 2'-O-methyl modified nucleotide
  modified_base 64: mod_base = OTHER; note = 2'-O-methyl modified nucleotide
  modified_base 65: mod_base = OTHER; note = 2'-O-methyl modified nucleotide
  modified_base 66: mod_base = OTHER; note = 2'-O-methyl modified nucleotide
  modified_base 67: mod_base = OTHER; note = 2'-O-methyl modified nucleotide
  modified_base 68: mod_base = OTHER; note = 2'-O-methyl modified nucleotide
  modified_base 69: mod_base = OTHER; note = 2'-O-methyl modified nucleotide
  modified_base 70: mod_base = OTHER; note = 2'-O-methyl modified nucleotide
  modified_base 75: mod_base = OTHER; note = 2'-O-methyl modified nucleotide
  modified_base 77: mod_base = OTHER; note = 2'-O-methyl modified nucleotide
  modified_base 80: mod_base = OTHER; note = 2'-O-methyl modified nucleotide
  modified_base 86: mod_base = OTHER; note = 2'-O-methyl modified nucleotide
  modified_base 87: mod_base = OTHER; note = 2'-O-methyl modified nucleotide
  modified_base 89: mod_base = OTHER; note = 2'-O-methyl modified nucleotide
  modified_base 90: mod_base = OTHER; note = 2'-O-methyl modified nucleotide
  modified_base 91: mod_base = OTHER; note = 2'-O-methyl modified nucleotide
  modified_base 92: mod_base = OTHER; note = 2'-O-methyl modified nucleotide
  modified_base 99: mod_base = OTHER; note = nucleotide with phosphorothioate linkage
  modified_base 100: mod_base = OTHER; note = 2'-O-methyl modified nucleotide with phosphorothioate linkage
  modified_base 101: mod_base = OTHER; note = 2'-O-methyl modified nucleotide

SEQ ID NO: 2185 - RNA, 101 nt, synthetic construct; identical to SEQ ID NO: 1185
  source 1..101: mol_type = other RNA
  modified_base 1: mod_base = OTHER; note = 2'-O-methyl modified nucleotide with phosphorothioate linkage
  modified_base 2: mod_base = OTHER; note = 2'-O-methyl modified nucleotide with phosphorothioate linkage
  modified_base 3: mod_base = OTHER; note = 2'-O-methyl modified nucleotide with phosphorothioate linkage
  modified_base 4: mod_base = OTHER; note = 2'-O-methyl modified nucleotide
  modified_base 5: mod_base = OTHER; note = 2'-O-methyl modified nucleotide
  modified_base 8: mod_base = OTHER; note = 2'-O-methyl modified nucleotide
  modified_base 9: mod_base = OTHER; note = 2'-O-methyl modified nucleotide
  modified_base 11: mod_base = OTHER; note = 2'-O-methyl modified nucleotide
  modified_base 13: mod_base = OTHER; note = 2'-O-methyl modified nucleotide
  modified_base 18: mod_base = OTHER; note = 2'-O-methyl modified nucleotide
  modified_base 22: mod_base = OTHER; note = 2'-O-methyl modified nucleotide
  modified_base 25: mod_base = OTHER; note = 2'-O-methyl modified nucleotide
  modified_base 29: mod_base = OTHER; note = 2'-O-methyl modified nucleotide
  modified_base 30: mod_base = OTHER; note = 2'-O-methyl modified nucleotide
  modified_base 31: mod_base = OTHER; note = 2'-O-methyl modified nucleotide
  modified_base 32: mod_base = OTHER; note = 2'-O-methyl modified nucleotide
  modified_base 37: mod_base = OTHER; note = 2'-O-methyl modified nucleotide
  modified_base 38: mod_base = OTHER; note = 2'-O-methyl modified nucleotide
  modified_base 39: mod_base = OTHER; note = 2'-O-methyl modified nucleotide
  modified_base 40: mod_base = OTHER; note = 2'-O-methyl modified nucleotide
  modified_base 41: mod_base = OTHER; note = 2'-O-methyl modified nucleotide
  modified_base 42: mod_base = OTHER; note = 2'-O-methyl modified nucleotide
  modified_base 43: mod_base = OTHER; note = 2'-O-methyl modified nucleotide
  modified_base 47: mod_base = OTHER; note = 2'-O-methyl modified nucleotide
  modified_base 48: mod_base = OTHER; note = 2'-O-methyl modified nucleotide
  modified_base 51: mod_base = OTHER; note = 2'-O-methyl modified nucleotide
  modified_base 54: mod_base = OTHER; note = nucleotide with phosphorothioate linkage
  modified_base 58: mod_base = OTHER; note = 2'-O-methyl modified nucleotide
  modified_base 59: mod_base = OTHER; note = 2'-O-methyl modified nucleotide
  modified_base 61: mod_base = OTHER; note = 2'-O-methyl modified nucleotide
  modified_base 62: mod_base = OTHER; note = 2'-O-methyl modified nucleotide
  modified_base 63: mod_base = OTHER; note = 2'-O-methyl modified nucleotide
  modified_base 64: mod_base = OTHER; note = 2'-O-methyl modified nucleotide
  modified_base 65: mod_base = OTHER; note = 2'-O-methyl modified nucleotide
  modified_base 66: mod_base = OTHER; note = 2'-O-methyl modified nucleotide
  modified_base 67: mod_base = OTHER; note = 2'-O-methyl modified nucleotide
  modified_base 68: mod_base = OTHER; note = 2'-O-methyl modified nucleotide
  modified_base 69: mod_base = OTHER; note = 2'-O-methyl modified nucleotide
  modified_base 70: mod_base = OTHER; note = 2'-O-methyl modified nucleotide
  modified_base 75: mod_base = OTHER; note = 2'-O-methyl modified nucleotide
  modified_base 77: mod_base = OTHER; note = 2'-O-methyl modified nucleotide
  modified_base 80: mod_base = OTHER; note = 2'-O-methyl modified nucleotide
  modified_base 86: mod_base = OTHER; note = 2'-O-methyl modified nucleotide
  modified_base 87: mod_base = OTHER; note = 2'-O-methyl modified nucleotide
  modified_base 89: mod_base = OTHER; note = 2'-O-methyl modified nucleotide
  modified_base 90: mod_base = OTHER; note = 2'-O-methyl modified nucleotide
  modified_base 91: mod_base = OTHER; note = 2'-O-methyl modified nucleotide
  modified_base 92: mod_base = OTHER; note = 2'-O-methyl modified nucleotide
  modified_base 99: mod_base = OTHER; note = nucleotide with phosphorothioate linkage
  modified_base 100: mod_base = OTHER; note = 2'-O-methyl modified nucleotide with phosphorothioate linkage
  modified_base 101: mod_base = OTHER; note = 2'-O-methyl modified nucleotide

SEQ ID NO: 2186 - RNA, 101 nt, synthetic construct; identical to SEQ ID NO: 1163
  source 1..101: mol_type = other RNA
  modified_base 1: mod_base = OTHER; note = 2'-O-methyl modified nucleotide with phosphorothioate linkage
  modified_base 2: mod_base = OTHER; note = 2'-O-methyl modified nucleotide with phosphorothioate linkage
  modified_base 3: mod_base = OTHER; note = 2'-O-methyl modified nucleotide with phosphorothioate linkage
  modified_base 4: mod_base = OTHER; note = 2'-O-methyl modified nucleotide
  modified_base 5: mod_base = OTHER; note = 2'-O-methyl modified nucleotide
  modified_base 8: mod_base = OTHER; note = 2'-O-methyl modified nucleotide
  modified_base 9: mod_base = OTHER; note = 2'-O-methyl modified nucleotide
  modified_base 11: mod_base = OTHER; note = 2'-O-methyl modified nucleotide
  modified_base 13: mod_base = OTHER; note = 2'-O-methyl modified nucleotide
  modified_base 18: mod_base = OTHER; note = 2'-O-methyl modified nucleotide
  modified_base 22: mod_base = OTHER; note = 2'-O-methyl modified nucleotide
  modified_base 25: mod_base = OTHER; note = 2'-O-methyl modified nucleotide
  modified_base 29: mod_base = OTHER; note = 2'-O-methyl modified nucleotide
  modified_base 30: mod_base = OTHER; note = 2'-O-methyl modified nucleotide
  modified_base 31: mod_base = OTHER; note = 2'-O-methyl modified nucleotide
  modified_base 32: mod_base = OTHER; note = 2'-O-methyl modified nucleotide
  modified_base 37: mod_base = OTHER; note = 2'-O-methyl modified nucleotide
  modified_base 38: mod_base = OTHER; note = 2'-O-methyl modified nucleotide
  modified_base 39: mod_base = OTHER; note = 2'-O-methyl modified nucleotide
  modified_base 40: mod_base = OTHER; note = 2'-O-methyl modified nucleotide
  modified_base 41: mod_base = OTHER; note = 2'-O-methyl modified nucleotide
  modified_base 42: mod_base = OTHER; note = 2'-O-methyl modified nucleotide
  modified_base 43: mod_base = OTHER; note = 2'-O-methyl modified nucleotide
  modified_base 47: mod_base = OTHER; note = 2'-O-methyl modified nucleotide
  modified_base 48: mod_base = OTHER; note = 2'-O-methyl modified nucleotide
  modified_base 51: mod_base = OTHER; note = 2'-O-methyl modified nucleotide
  modified_base 58: mod_base = OTHER; note = 2'-O-methyl modified nucleotide
  modified_base 59: mod_base = OTHER; note = 2'-O-methyl modified nucleotide
  modified_base 61: mod_base = OTHER; note = 2'-O-methyl modified nucleotide
  modified_base 62: mod_base = OTHER; note = 2'-O-methyl modified nucleotide
  modified_base 63: mod_base = OTHER; note = 2'-O-methyl modified nucleotide
  modified_base 64: mod_base = OTHER; note = 2'-O-methyl modified nucleotide
  modified_base 65: mod_base = OTHER; note = 2'-O-methyl modified nucleotide
  modified_base 66: mod_base = OTHER; note = 2'-O-methyl modified nucleotide
  modified_base 67: mod_base = OTHER; note = 2'-O-methyl modified nucleotide
  modified_base 68: mod_base = OTHER; note = 2'-O-methyl modified nucleotide
  modified_base 69: mod_base = OTHER; note = 2'-O-methyl modified nucleotide
  modified_base 70: mod_base = OTHER; note = 2'-O-methyl modified nucleotide
  modified_base 75: mod_base = OTHER; note = 2'-O-methyl modified nucleotide
  modified_base 77: mod_base = OTHER; note = 2'-O-methyl modified nucleotide
  modified_base 80: mod_base = OTHER; note = 2'-O-methyl modified nucleotide
  modified_base 86: mod_base = OTHER; note = 2'-O-methyl modified nucleotide
  modified_base 87: mod_base = OTHER; note = 2'-O-methyl modified nucleotide
  modified_base 89: mod_base = OTHER; note = 2'-O-methyl modified nucleotide
  modified_base 90: mod_base = OTHER; note = 2'-O-methyl modified nucleotide
  modified_base 91: mod_base = OTHER; note = 2'-O-methyl modified nucleotide
  modified_base 92: mod_base = OTHER; note = 2'-O-methyl modified nucleotide
  modified_base 99: mod_base = OTHER; note = nucleotide with phosphorothioate linkage
  modified_base 100: mod_base = OTHER; note = 2'-O-methyl modified nucleotide with phosphorothioate linkage
  modified_base 101: mod_base = OTHER; note = 2'-O-methyl modified nucleotide

SEQ ID NO: 2187 - RNA, 101 nt, synthetic construct; identical to SEQ ID NO: 1164
  source 1..101: mol_type = other RNA
  modified_base 1: mod_base = OTHER; note = 2'-O-methyl modified nucleotide with phosphorothioate linkage
  modified_base 2: mod_base = OTHER; note = 2'-O-methyl modified nucleotide with phosphorothioate linkage
  modified_base 3: mod_base = OTHER; note = 2'-O-methyl modified nucleotide with phosphorothioate linkage
  modified_base 4: mod_base = OTHER; note = 2'-O-methyl modified nucleotide
  modified_base 5: mod_base = OTHER; note = 2'-O-methyl modified nucleotide
  modified_base 8: mod_base = OTHER; note = 2'-O-methyl modified nucleotide
  modified_base 9: mod_base = OTHER; note = 2'-O-methyl modified nucleotide
  modified_base 11: mod_base = OTHER; note = 2'-O-methyl modified nucleotide
  modified_base 13: mod_base = OTHER; note = 2'-O-methyl modified nucleotide
  modified_base 18: mod_base = OTHER; note = 2'-O-methyl modified nucleotide
  modified_base 22: mod_base = OTHER; note = 2'-O-methyl modified nucleotide
  modified_base 25: mod_base = OTHER; note = 2'-O-methyl modified nucleotide
  modified_base 29: mod_base = OTHER; note = 2'-O-methyl modified nucleotide
  modified_base 30: mod_base = OTHER; note = 2'-O-methyl modified nucleotide
  modified_base 31: mod_base = OTHER; note = 2'-O-methyl modified nucleotide
  modified_base 32: mod_base = OTHER; note = 2'-O-methyl modified nucleotide
  modified_base 37: mod_base = OTHER; note = 2'-O-methyl modified nucleotide
  modified_base 38: mod_base = OTHER; note = 2'-O-methyl modified nucleotide
  modified_base 39: mod_base = OTHER; note = 2'-O-methyl modified nucleotide
  modified_base 40: mod_base = OTHER; note = 2'-O-methyl modified nucleotide
  modified_base 41: mod_base = OTHER; note = 2'-O-methyl modified nucleotide
  modified_base 42: mod_base = OTHER; note = 2'-O-methyl modified nucleotide
  modified_base 43: mod_base = OTHER; note = 2'-O-methyl modified nucleotide
  modified_base 47: mod_base = OTHER; note = 2'-O-methyl modified nucleotide
  modified_base 48: mod_base = OTHER; note = 2'-O-methyl modified nucleotide
  modified_base 51: mod_base = OTHER; note = 2'-O-methyl modified nucleotide
  modified_base 58: mod_base = OTHER; note = 2'-O-methyl modified nucleotide
  modified_base 59: mod_base = OTHER; note = 2'-O-methyl modified nucleotide
  modified_base 61: mod_base = OTHER; note = 2'-O-methyl modified nucleotide
  modified_base 62: mod_base = OTHER; note = 2'-O-methyl modified nucleotide
  modified_base 63: mod_base = OTHER; note = 2'-O-methyl modified nucleotide
  modified_base 64: mod_base = OTHER; note = 2'-O-methyl modified nucleotide
  modified_base 65: mod_base = OTHER; note = 2'-O-methyl modified nucleotide
  modified_base 66: mod_base = OTHER; note = 2'-O-methyl modified nucleotide
  modified_base 67: mod_base = OTHER; note = 2'-O-methyl modified nucleotide
  modified_base 68: mod_base = OTHER; note = 2'-O-methyl modified nucleotide
  modified_base 69: mod_base = OTHER; note = 2'-O-methyl modified nucleotide
  modified_base 70: mod_base = OTHER; note = 2'-O-methyl modified nucleotide
  modified_base 75: mod_base = OTHER; note = 2'-O-methyl modified nucleotide
  modified_base 77: mod_base = OTHER; note = 2'-O-methyl modified nucleotide
  modified_base 80: mod_base = OTHER; note = 2'-O-methyl modified nucleotide
  modified_base 86: mod_base = OTHER; note = 2'-O-methyl modified nucleotide
  modified_base 87: mod_base = OTHER; note = 2'-O-methyl modified nucleotide
  modified_base 89: mod_base = OTHER; note = 2'-O-methyl modified nucleotide
  modified_base 90: mod_base = OTHER; note = 2'-O-methyl modified nucleotide
  modified_base 91: mod_base = OTHER; note = 2'-O-methyl modified nucleotide
  modified_base 92: mod_base = OTHER; note = 2'-O-methyl modified nucleotide
  modified_base 99: mod_base = OTHER; note = nucleotide with phosphorothioate linkage
  modified_base 100: mod_base = OTHER; note = 2'-O-methyl modified nucleotide with phosphorothioate linkage
  modified_base 101: mod_base = OTHER; note = 2'-O-methyl modified nucleotide

SEQ ID NO: 2188 - RNA, 101 nt, synthetic construct; identical to SEQ ID NO: 1165
  source 1..101: mol_type = other RNA
  modified_base 1: mod_base = OTHER; note = 2'-O-methyl modified nucleotide with phosphorothioate linkage
  modified_base 2: mod_base = OTHER; note = 2'-O-methyl modified nucleotide with phosphorothioate linkage
  modified_base 3: mod_base = OTHER; note = 2'-O-methyl modified nucleotide with phosphorothioate linkage
  modified_base 4: mod_base = OTHER; note = 2'-O-methyl modified nucleotide
  modified_base 5: mod_base = OTHER; note = 2'-O-methyl modified nucleotide
  modified_base 8: mod_base = OTHER; note = 2'-O-methyl modified nucleotide
  modified_base 9: mod_base = OTHER; note = 2'-O-methyl modified nucleotide
  modified_base 11: mod_base = OTHER; note = 2'-O-methyl modified nucleotide
  modified_base 13: mod_base = OTHER; note = 2'-O-methyl modified nucleotide
  modified_base 18: mod_base = OTHER; note = 2'-O-methyl modified nucleotide
  modified_base 22: mod_base = OTHER; note = 2'-O-methyl modified nucleotide
  modified_base 25: mod_base = OTHER; note = 2'-O-methyl modified nucleotide
  modified_base 29: mod_base = OTHER; note = 2'-O-methyl modified nucleotide
  modified_base 30: mod_base = OTHER; note = 2'-O-methyl modified nucleotide
  modified_base 31: mod_base = OTHER; note = 2'-O-methyl modified nucleotide
  modified_base 32: mod_base = OTHER; note = 2'-O-methyl modified nucleotide
  modified_base 37: mod_base = OTHER; note = 2'-O-methyl modified nucleotide
  modified_base 38: mod_base = OTHER; note = 2'-O-methyl modified nucleotide
  modified_base 39: mod_base = OTHER; note = 2'-O-methyl modified nucleotide
  modified_base 40: mod_base = OTHER; note = 2'-O-methyl modified nucleotide
  modified_base 41: mod_base = OTHER; note = 2'-O-methyl modified nucleotide
  modified_base 42: mod_base = OTHER; note = 2'-O-methyl modified nucleotide
  modified_base 43: mod_base = OTHER; note = 2'-O-methyl modified nucleotide
  modified_base 47: mod_base = OTHER; note = 2'-O-methyl modified nucleotide
  modified_base 48: mod_base = OTHER; note = 2'-O-methyl modified nucleotide
  modified_base 51: mod_base = OTHER; note = 2'-O-methyl modified nucleotide
  modified_base 58: mod_base = OTHER; note = 2'-O-methyl modified nucleotide
  modified_base 59: mod_base = OTHER; note = 2'-O-methyl modified nucleotide
  modified_base 61: mod_base = OTHER; note = 2'-O-methyl modified nucleotide
  modified_base 62: mod_base = OTHER; note = 2'-O-methyl modified nucleotide
  modified_base 63: mod_base = OTHER; note = 2'-O-methyl modified nucleotide
  modified_base 64: mod_base = OTHER; note = 2'-O-methyl modified nucleotide
  modified_base 65: mod_base = OTHER; note = 2'-O-methyl modified nucleotide
  modified_base 66: mod_base = OTHER; note = 2'-O-methyl modified nucleotide
  modified_base 67: mod_base = OTHER; note = 2'-O-methyl modified nucleotide
  modified_base 68: mod_base = OTHER; note = 2'-O-methyl modified nucleotide
  modified_base 69: mod_base = OTHER; note = 2'-O-methyl modified nucleotide
  modified_base 70: mod_base = OTHER; note = 2'-O-methyl modified nucleotide
  modified_base 75: mod_base = OTHER; note = 2'-O-methyl modified nucleotide
  modified_base 77: mod_base = OTHER; note = 2'-O-methyl modified nucleotide
  modified_base 80: mod_base = OTHER; note = 2'-O-methyl modified nucleotide
  modified_base 86: mod_base = OTHER; note = 2'-O-methyl modified nucleotide
  modified_base 87: mod_base = OTHER; note = 2'-O-methyl modified nucleotide
  modified_base 89: mod_base = OTHER; note = 2'-O-methyl modified nucleotide
  modified_base 90: mod_base = OTHER; note = 2'-O-methyl modified nucleotide
  modified_base 91: mod_base = OTHER; note = 2'-O-methyl modified nucleotide
  modified_base 92: mod_base = OTHER; note = 2'-O-methyl modified nucleotide
  modified_base 99: mod_base = OTHER; note = nucleotide with phosphorothioate linkage
  modified_base 100: mod_base = OTHER; note = 2'-O-methyl modified nucleotide with phosphorothioate linkage
  modified_base 101: mod_base = OTHER; note = 2'-O-methyl modified nucleotide

SEQ ID NO: 2189 - RNA, 101 nt, synthetic construct; identical to SEQ ID NO: 1166
  source 1..101: mol_type = other RNA
  modified_base 1: mod_base = OTHER; note = 2'-O-methyl modified nucleotide with phosphorothioate linkage
  modified_base 2: mod_base = OTHER; note = 2'-O-methyl modified nucleotide with phosphorothioate linkage
  modified_base 3: mod_base = OTHER; note = 2'-O-methyl modified nucleotide with phosphorothioate linkage
  modified_base 4: mod_base = OTHER; note = 2'-O-methyl modified nucleotide
  modified_base 5: mod_base = OTHER; note = 2'-O-methyl modified nucleotide
  modified_base 8: mod_base = OTHER; note = 2'-O-methyl modified nucleotide
  modified_base 9: mod_base = OTHER; note = 2'-O-methyl modified nucleotide
  modified_base 11: mod_base = OTHER; note = 2'-O-methyl modified nucleotide
  modified_base 13: mod_base = OTHER; note = 2'-O-methyl modified nucleotide
  modified_base 18: mod_base = OTHER; note = 2'-O-methyl modified nucleotide
  modified_base 22: mod_base = OTHER; note = 2'-O-methyl modified nucleotide
  modified_base 25: mod_base = OTHER; note = 2'-O-methyl modified nucleotide
  modified_base 29: mod_base = OTHER; note = 2'-O-methyl modified nucleotide
  modified_base 30: mod_base = OTHER; note = 2'-O-methyl modified nucleotide
  modified_base 31: mod_base = OTHER; note = 2'-O-methyl modified nucleotide
  modified_base 32: mod_base = OTHER; note = 2'-O-methyl modified nucleotide
  modified_base 37: mod_base = OTHER; note = 2'-O-methyl modified nucleotide
  modified_base 38: mod_base = OTHER; note = 2'-O-methyl modified nucleotide
  modified_base 39: mod_base = OTHER; note = 2'-O-methyl modified nucleotide
  modified_base 40: mod_base = OTHER; note = 2'-O-methyl modified nucleotide
  modified_base 41: mod_base = OTHER; note = 2'-O-methyl modified nucleotide
  modified_base 42: mod_base = OTHER; note = 2'-O-methyl modified nucleotide
  modified_base 43: mod_base = OTHER; note = 2'-O-methyl modified nucleotide
  modified_base 47: mod_base = OTHER; note = 2'-O-methyl modified nucleotide
  modified_base 48: mod_base = OTHER; note = 2'-O-methyl modified nucleotide
  modified_base 51: mod_base = OTHER; note = 2'-O-methyl modified nucleotide
  modified_base 58: mod_base = OTHER; note = 2'-O-methyl modified nucleotide
  modified_base 59: mod_base = OTHER; note = 2'-O-methyl modified nucleotide
  modified_base 61: mod_base = OTHER; note = 2'-O-methyl modified nucleotide
  modified_base 62: mod_base = OTHER; note = 2'-O-methyl modified nucleotide
  modified_base 63: mod_base = OTHER; note = 2'-O-methyl modified nucleotide
  modified_base 64: mod_base = OTHER; note = 2'-O-methyl modified nucleotide
  modified_base 65: mod_base = OTHER; note = 2'-O-methyl modified nucleotide
  modified_base 66: mod_base = OTHER; note = 2'-O-methyl modified nucleotide
  modified_base 67: mod_base = OTHER; note = 2'-O-methyl modified nucleotide
  modified_base 68: mod_base = OTHER; note = 2'-O-methyl modified nucleotide
  modified_base 69: mod_base = OTHER; note = 2'-O-methyl modified nucleotide
  modified_base 70: mod_base = OTHER; note = 2'-O-methyl modified nucleotide
  modified_base 75: mod_base = OTHER; note = 2'-O-methyl modified nucleotide
  modified_base 77: mod_base = OTHER; note = 2'-O-methyl modified nucleotide
  modified_base 80: mod_base = OTHER; note = 2'-O-methyl modified nucleotide
  modified_base 86: mod_base = OTHER; note = 2'-O-methyl modified nucleotide
  modified_base 87: mod_base = OTHER; note = 2'-O-methyl modified nucleotide
  modified_base 89: mod_base = OTHER; note = 2'-O-methyl modified nucleotide
  modified_base 90: mod_base = OTHER; note = 2'-O-methyl modified nucleotide
  modified_base 91: mod_base = OTHER; note = 2'-O-methyl modified nucleotide
  modified_base 92: mod_base = OTHER; note = 2'-O-methyl modified nucleotide
  modified_base 99: mod_base = OTHER; note = nucleotide with phosphorothioate linkage
  modified_base 100: mod_base = OTHER; note = 2'-O-methyl modified nucleotide with phosphorothioate linkage
  modified_base 101: mod_base = OTHER; note = 2'-O-methyl modified nucleotide

SEQ ID NO: 2190 - RNA, 101 nt, synthetic construct; identical to SEQ ID NO: 1169
  source 1..101: mol_type = other RNA
  modified_base 1: mod_base = OTHER; note = 2'-O-methyl modified nucleotide with phosphorothioate linkage
  modified_base 2: mod_base = OTHER; note = 2'-O-methyl modified nucleotide with phosphorothioate linkage
  modified_base 3: mod_base = OTHER; note = 2'-O-methyl modified nucleotide with phosphorothioate linkage
  modified_base 4: mod_base = OTHER; note = 2'-O-methyl modified nucleotide
  modified_base 5: mod_base = OTHER; note = 2'-O-methyl modified nucleotide
  modified_base 8: mod_base = OTHER; note = 2'-O-methyl modified nucleotide
  modified_base 9: mod_base = OTHER; note = 2'-O-methyl modified nucleotide
  modified_base 11: mod_base = OTHER; note = 2'-O-methyl modified nucleotide
  modified_base 13: mod_base = OTHER; note = 2'-O-methyl modified nucleotide
  modified_base 18: mod_base = OTHER; note = 2'-O-methyl modified nucleotide
  modified_base 22: mod_base = OTHER; note = 2'-O-methyl modified nucleotide
  modified_base 25: mod_base = OTHER; note = 2'-O-methyl modified nucleotide
  modified_base 29: mod_base = OTHER; note = 2'-O-methyl modified nucleotide
  modified_base 30: mod_base = OTHER; note = 2'-O-methyl modified nucleotide
  modified_base 31: mod_base = OTHER; note = 2'-O-methyl modified nucleotide
  modified_base 32: mod_base = OTHER; note = 2'-O-methyl modified nucleotide
  modified_base 37: mod_base = OTHER; note = 2'-O-methyl modified nucleotide
  modified_base 38: mod_base = OTHER; note = 2'-O-methyl modified nucleotide
  modified_base 39: mod_base = OTHER; note = 2'-O-methyl modified nucleotide
  modified_base 40: mod_base = OTHER; note = 2'-O-methyl modified nucleotide
  modified_base 41: mod_base = OTHER; note = 2'-O-methyl modified nucleotide
  modified_base 42: mod_base = OTHER; note = 2'-O-methyl modified nucleotide
  modified_base 43: mod_base = OTHER; note = 2'-O-methyl modified nucleotide
  modified_base 47: mod_base = OTHER; note = 2'-O-methyl modified nucleotide
  modified_base 48: mod_base = OTHER; note = 2'-O-methyl modified nucleotide
  modified_base 51: mod_base = OTHER; note = 2'-O-methyl modified nucleotide
  modified_base 58: mod_base = OTHER; note = 2'-O-methyl modified nucleotide
  modified_base 59: mod_base = OTHER; note = 2'-O-methyl modified nucleotide
  modified_base 61: mod_base = OTHER; note = 2'-O-methyl modified nucleotide
  modified_base 62: mod_base = OTHER; note = 2'-O-methyl modified nucleotide
  modified_base 63: mod_base = OTHER; note = 2'-O-methyl modified nucleotide
  modified_base 64: mod_base = OTHER; note = 2'-O-methyl modified nucleotide
  modified_base 65: mod_base = OTHER; note = 2'-O-methyl modified nucleotide
  modified_base 66: mod_base = OTHER; note = 2'-O-methyl modified nucleotide
  modified_base 67: mod_base = OTHER; note = 2'-O-methyl modified nucleotide
  modified_base 68: mod_base = OTHER; note = 2'-O-methyl modified nucleotide
  modified_base 69: mod_base = OTHER; note = 2'-O-methyl modified nucleotide
  modified_base 70: mod_base = OTHER; note = 2'-O-methyl modified nucleotide
  modified_base 75: mod_base = OTHER; note = 2'-O-methyl modified nucleotide
  modified_base 77: mod_base = OTHER; note = 2'-O-methyl modified nucleotide
  modified_base 80: mod_base = OTHER; note = 2'-O-methyl modified nucleotide
  modified_base 86: mod_base = OTHER; note = 2'-O-methyl modified nucleotide
  modified_base 87: mod_base = OTHER; note = 2'-O-methyl modified nucleotide
  modified_base 89: mod_base = OTHER; note = 2'-O-methyl modified nucleotide
  modified_base 90: mod_base = OTHER; note = 2'-O-methyl modified nucleotide
  modified_base 91: mod_base = OTHER; note = 2'-O-methyl modified nucleotide
  modified_base 92: mod_base = OTHER; note = 2'-O-methyl modified nucleotide
  modified_base 99: mod_base = OTHER; note = nucleotide with phosphorothioate linkage
  modified_base 100: mod_base = OTHER; note = 2'-O-methyl modified nucleotide with phosphorothioate linkage
  modified_base 101: mod_base = OTHER; note = 2'-O-methyl modified nucleotide

SEQ ID NO: 2191 - RNA, 101 nt, synthetic construct; identical to SEQ ID NO: 1177
  source 1..101: mol_type = other RNA
  modified_base 1: mod_base = OTHER; note = 2'-O-methyl modified nucleotide with phosphorothioate linkage
  modified_base 2: mod_base = OTHER; note = 2'-O-methyl modified nucleotide with phosphorothioate linkage
  modified_base 3: mod_base = OTHER; note = 2'-O-methyl modified nucleotide with phosphorothioate linkage
  modified_base 4: mod_base = OTHER; note = 2'-O-methyl modified nucleotide
  modified_base 5: mod_base = OTHER; note = 2'-O-methyl modified nucleotide
  modified_base 8: mod_base = OTHER; note = 2'-O-methyl modified nucleotide
  modified_base 9: mod_base = OTHER; note = 2'-O-methyl modified nucleotide
  modified_base 11: mod_base = OTHER; note = 2'-O-methyl modified nucleotide
  modified_base 13: mod_base = OTHER; note = 2'-O-methyl modified nucleotide
  modified_base 18: mod_base = OTHER; note = 2'-O-methyl modified nucleotide
  modified_base 22: mod_base = OTHER; note = 2'-O-methyl modified nucleotide
  modified_base 25: mod_base = OTHER; note = 2'-O-methyl modified nucleotide
  modified_base 29: mod_base = OTHER; note = 2'-O-methyl modified nucleotide
  modified_base 30: mod_base = OTHER; note = 2'-O-methyl modified nucleotide
  modified_base 31: mod_base = OTHER; note = 2'-O-methyl modified nucleotide
  modified_base 32: mod_base = OTHER; note = 2'-O-methyl modified nucleotide
  modified_base 37: mod_base = OTHER; note = 2'-O-methyl modified nucleotide
  modified_base 38: mod_base = OTHER; note = 2'-O-methyl modified nucleotide
  modified_base 39: mod_base = OTHER; note = 2'-O-methyl modified nucleotide
  modified_base 40: mod_base = OTHER; note = 2'-O-methyl modified nucleotide
  modified_base 41: mod_base = OTHER; note = 2'-O-methyl modified nucleotide
  modified_base 42: mod_base = OTHER; note = 2'-O-methyl modified nucleotide
  modified_base 43: mod_base = OTHER; note = 2'-O-methyl modified nucleotide
  modified_base 47: mod_base = OTHER; note = 2'-O-methyl modified nucleotide
  modified_base 48: mod_base = OTHER; note = 2'-O-methyl modified nucleotide
  modified_base 51: mod_base = OTHER; note = 2'-O-methyl modified nucleotide
  modified_base 58: mod_base = OTHER; note = 2'-O-methyl modified nucleotide
  modified_base 59: mod_base = OTHER; note = 2'-O-methyl modified nucleotide
  modified_base 61: mod_base = OTHER; note = 2'-O-methyl modified nucleotide
  modified_base 62: mod_base = OTHER; note = 2'-O-methyl modified nucleotide
  modified_base 63: mod_base = OTHER; note = 2'-O-methyl modified nucleotide
  modified_base 64: mod_base = OTHER; note = 2'-O-methyl modified nucleotide
  modified_base 65: mod_base = OTHER; note = 2'-O-methyl modified nucleotide
  modified_base 66: mod_base = OTHER; note = 2'-O-methyl modified nucleotide
  modified_base 67: mod_base = OTHER; note = 2'-O-methyl modified nucleotide
  modified_base 68: mod_base = OTHER; note = 2'-O-methyl modified nucleotide
  modified_base 69: mod_base = OTHER; note = 2'-O-methyl modified nucleotide
  modified_base 70: mod_base = OTHER; note = 2'-O-methyl modified nucleotide
  modified_base 75: mod_base = OTHER; note = 2'-O-methyl modified nucleotide
  modified_base 77: mod_base = OTHER; note = 2'-O-methyl modified nucleotide
  modified_base 80: mod_base = OTHER; note = 2'-O-methyl modified nucleotide
  modified_base 86: mod_base = OTHER; note = 2'-O-methyl modified nucleotide
  modified_base 87: mod_base = OTHER; note = 2'-O-methyl modified nucleotide
  modified_base 89: mod_base = OTHER; note = 2'-O-methyl modified nucleotide
  modified_base 90: mod_base = OTHER; note = 2'-O-methyl modified nucleotide
  modified_base 91: mod_base = OTHER; note = 2'-O-methyl modified nucleotide
  modified_base 92: mod_base = OTHER; note = 2'-O-methyl modified nucleotide
  modified_base 99: mod_base = OTHER; note = nucleotide with phosphorothioate linkage
  modified_base 100: mod_base = OTHER; note = 2'-O-methyl modified nucleotide with phosphorothioate linkage
  modified_base 101: mod_base = OTHER; note = 2'-O-methyl modified nucleotide

SEQ ID NO: 2192-2300 - skipped (109 entries)

SEQ ID NO: 2301 - RNA, 100 nt, synthetic construct; identical to SEQ ID NO: 1301
  source 1..100: mol_type = other RNA
  modified_base 1: mod_base = OTHER; note = 2'-O-methyl modified nucleotide with phosphorothioate linkage
  modified_base 2: mod_base = OTHER; note = 2'-O-methyl modified nucleotide with phosphorothioate linkage
  modified_base 3: mod_base = OTHER; note = 2'-O-methyl modified nucleotide with phosphorothioate linkage
  modified_base 29: mod_base = OTHER; note = 2'-O-methyl modified nucleotide
  modified_base 30: mod_base = OTHER; note = 2'-O-methyl modified nucleotide
  modified_base 31: mod_base = OTHER; note = 2'-O-methyl modified nucleotide
  modified_base 32: mod_base = OTHER; note = 2'-O-methyl modified nucleotide
  modified_base 33: mod_base = OTHER; note = 2'-O-methyl modified nucleotide
  modified_base 34: mod_base = OTHER; note = 2'-O-methyl modified nucleotide
  modified_base 35: mod_base = OTHER; note = 2'-O-methyl modified nucleotide
  modified_base 36: mod_base = OTHER; note = 2'-O-methyl modified nucleotide
  modified_base 37: mod_base = OTHER; note = 2'-O-methyl modified nucleotide
  modified_base 38: mod_base = OTHER; note = 2'-O-methyl modified nucleotide
  modified_base 39: mod_base = OTHER; note = 2'-O-methyl modified nucleotide
  modified_base 40: mod_base = OTHER; note = 2'-O-methyl modified nucleotide
  modified_base 69: mod_base = OTHER; note = 2'-O-methyl modified nucleotide
  modified_base 70: mod_base = OTHER; note = 2'-O-methyl modified nucleotide
  modified_base 71: mod_base = OTHER; note = 2'-O-methyl modified nucleotide
  modified_base 72: mod_base = OTHER; note = 2'-O-methyl modified nucleotide
  modified_base 73: mod_base = OTHER; note = 2'-O-methyl modified nucleotide
  modified_base 74: mod_base = OTHER; note = 2'-O-methyl modified nucleotide
  modified_base 75: mod_base = OTHER; note = 2'-O-methyl modified nucleotide
  modified_base 76: mod_base = OTHER; note = 2'-O-methyl modified nucleotide
  modified_base 77: mod_base = OTHER; note = 2'-O-methyl modified nucleotide
  modified_base 78: mod_base = OTHER; note = 2'-O-methyl modified nucleotide
  modified_base 79: mod_base = OTHER; note = 2'-O-methyl modified nucleotide
  modified_base 80: mod_base = OTHER; note = 2'-O-methyl modified nucleotide
  modified_base 81: mod_base = OTHER; note = 2'-O-methyl modified nucleotide
  modified_base 82: mod_base = OTHER; note = 2'-O-methyl modified nucleotide
  modified_base 83: mod_base = OTHER; note = 2'-O-methyl modified nucleotide
  modified_base 84: mod_base = OTHER; note = 2'-O-methyl modified nucleotide
  modified_base 85: mod_base = OTHER; note = 2'-O-methyl modified nucleotide
  modified_base 86: mod_base = OTHER; note = 2'-O-methyl modified nucleotide
  modified_base 87: mod_base = OTHER; note = 2'-O-methyl modified nucleotide
  modified_base 88: mod_base = OTHER; note = 2'-O-methyl modified nucleotide
  modified_base 89: mod_base = OTHER; note = 2'-O-methyl modified nucleotide
  modified_base 90: mod_base = OTHER; note = 2'-O-methyl modified nucleotide
  modified_base 91: mod_base = OTHER; note = 2'-O-methyl modified nucleotide
  modified_base 92: mod_base = OTHER; note = 2'-O-methyl modified nucleotide
  modified_base 93: mod_base = OTHER; note = 2'-O-methyl modified nucleotide
  modified_base 94: mod_base = OTHER; note = 2'-O-methyl modified nucleotide
  modified_base 95: mod_base = OTHER; note = 2'-O-methyl modified nucleotide
  modified_base 96: mod_base = OTHER; note = 2'-O-methyl modified nucleotide
  modified_base 97: mod_base = OTHER; note = 2'-O-methyl modified nucleotide with phosphorothioate linkage
  modified_base 98: mod_base = OTHER; note = 2'-O-methyl modified nucleotide with phosphorothioate linkage
  modified_base 99: mod_base = OTHER; note = 2'-O-methyl modified nucleotide with phosphorothioate linkage
  modified_base 100: mod_base = OTHER; note = 2'-O-methyl modified nucleotide
  misc_difference 97..100: note = This region may encompass 0-4 nucleotides

SEQ ID NO: 2302 - RNA, 100 nt, synthetic construct; identical to SEQ ID NO: 1302
  source 1..100: mol_type = other RNA
  modified_base 1: mod_base = OTHER; note = 2'-O-methyl modified nucleotide with phosphorothioate linkage
  modified_base 2: mod_base = OTHER; note = 2'-O-methyl modified nucleotide with phosphorothioate linkage
  modified_base 3: mod_base = OTHER; note = 2'-O-methyl modified nucleotide with phosphorothioate linkage
  modified_base 29: mod_base = OTHER; note = 2'-O-methyl modified nucleotide
  modified_base 30: mod_base = OTHER; note = 2'-O-methyl modified nucleotide
  modified_base 31: mod_base = OTHER; note = 2'-O-methyl modified nucleotide
  modified_base 32: mod_base = OTHER; note = 2'-O-methyl modified nucleotide
  modified_base 33: mod_base = OTHER; note = 2'-O-methyl modified nucleotide
  modified_base 34: mod_base = OTHER; note = 2'-O-methyl modified nucleotide
  modified_base 35: mod_base = OTHER; note = 2'-O-methyl modified nucleotide
  modified_base 36: mod_base = OTHER; note = 2'-O-methyl modified nucleotide
  modified_base 37: mod_base = OTHER; note = 2'-O-methyl modified nucleotide
  modified_base 38: mod_base = OTHER; note = 2'-O-methyl modified nucleotide
  modified_base 39: mod_base = OTHER; note = 2'-O-methyl modified nucleotide
  modified_base 40: mod_base = OTHER; note = 2'-O-methyl modified nucleotide
  modified_base 69: mod_base = OTHER; note = 2'-O-methyl modified nucleotide
  modified_base 70: mod_base = OTHER; note = 2'-O-methyl modified nucleotide
  modified_base 71: mod_base = OTHER; note = 2'-O-methyl modified nucleotide
  modified_base 72: mod_base = OTHER; note = 2'-O-methyl modified nucleotide
  modified_base 73: mod_base = OTHER; note = 2'-O-methyl modified nucleotide
  modified_base 74: mod_base = OTHER; note = 2'-O-methyl modified nucleotide
  modified_base 75: mod_base = OTHER; note = 2'-O-methyl modified nucleotide
  modified_base 76: mod_base = OTHER; note = 2'-O-methyl modified nucleotide
  modified_base 77: mod_base = OTHER; note = 2'-O-methyl modified nucleotide
  modified_base 78: mod_base = OTHER; note = 2'-O-methyl modified nucleotide
  modified_base 79: mod_base = OTHER; note = 2'-O-methyl modified nucleotide
  modified_base 80: mod_base = OTHER; note = 2'-O-methyl modified nucleotide
  modified_base 81: mod_base = OTHER; note = 2'-O-methyl modified nucleotide
  modified_base 82: mod_base = OTHER; note = 2'-O-methyl modified nucleotide
  modified_base 83: mod_base = OTHER; note = 2'-O-methyl modified nucleotide
  modified_base 84: mod_base = OTHER; note = 2'-O-methyl modified nucleotide
  modified_base 85: mod_base = OTHER; note = 2'-O-methyl modified nucleotide
  modified_base 86: mod_base = OTHER; note = 2'-O-methyl modified nucleotide
  modified_base 87: mod_base = OTHER; note = 2'-O-methyl modified nucleotide
  modified_base 88: mod_base = OTHER; note = 2'-O-methyl modified nucleotide
  modified_base 89: mod_base = OTHER; note = 2'-O-methyl modified nucleotide
  modified_base 90: mod_base = OTHER; note = 2'-O-methyl modified nucleotide
  modified_base 91: mod_base = OTHER; note = 2'-O-methyl modified nucleotide
  modified_base 92: mod_base = OTHER; note = 2'-O-methyl modified nucleotide
  modified_base 93: mod_base = OTHER; note = 2'-O-methyl modified nucleotide
  modified_base 94: mod_base = OTHER; note = 2'-O-methyl modified nucleotide
  modified_base 95: mod_base = OTHER; note = 2'-O-methyl modified nucleotide
  modified_base 96: mod_base = OTHER; note = 2'-O-methyl modified nucleotide
  modified_base 97: mod_base = OTHER; note = 2'-O-methyl modified nucleotide with phosphorothioate linkage
  modified_base 98: mod_base = OTHER; note = 2'-O-methyl modified nucleotide with phosphorothioate linkage
  modified_base 99: mod_base = OTHER; note = 2'-O-methyl modified nucleotide with phosphorothioate linkage
  modified_base 100: mod_base = OTHER; note = 2'-O-methyl modified nucleotide
  misc_difference 97..100: note = This region may encompass 0-4 nucleotides

SEQ ID NO: 2303 - RNA, 100 nt, synthetic construct; identical to SEQ ID NO: 1303
  source 1..100: mol_type = other RNA
  modified_base 1: mod_base = OTHER; note = 2'-O-methyl modified nucleotide with phosphorothioate linkage
  modified_base 2: mod_base = OTHER; note = 2'-O-methyl modified nucleotide with phosphorothioate linkage
  modified_base 3: mod_base = OTHER; note = 2'-O-methyl modified nucleotide with phosphorothioate linkage
  modified_base 29: mod_base = OTHER; note = 2'-O-methyl modified nucleotide
  modified_base 30: mod_base = OTHER; note = 2'-O-methyl modified nucleotide
  modified_base 31: mod_base = OTHER; note = 2'-O-methyl modified nucleotide
  modified_base 32: mod_base = OTHER; note = 2'-O-methyl modified nucleotide
  modified_base 33: mod_base = OTHER; note = 2'-O-methyl modified nucleotide
  modified_base 34: mod_base = OTHER; note = 2'-O-methyl modified nucleotide
  modified_base 35: mod_base = OTHER; note = 2'-O-methyl modified nucleotide
  modified_base 36: mod_base = OTHER; note = 2'-O-methyl modified nucleotide
  modified_base 37: mod_base = OTHER; note = 2'-O-methyl modified nucleotide
  modified_base 38: mod_base = OTHER; note = 2'-O-methyl modified nucleotide
  modified_base 39: mod_base = OTHER; note = 2'-O-methyl modified nucleotide
  modified_base 40: mod_base = OTHER; note = 2'-O-methyl modified nucleotide
  modified_base 69: mod_base = OTHER; note = 2'-O-methyl modified nucleotide
  modified_base 70: mod_base = OTHER; note = 2'-O-methyl modified nucleotide
  modified_base 71: mod_base = OTHER; note = 2'-O-methyl modified nucleotide
  modified_base 72: mod_base = OTHER; note = 2'-O-methyl modified nucleotide
  modified_base 73: mod_base = OTHER; note = 2'-O-methyl modified nucleotide
  modified_base 74: mod_base = OTHER; note = 2'-O-methyl modified nucleotide
  modified_base 75: mod_base = OTHER; note = 2'-O-methyl modified nucleotide
  modified_base 76: mod_base = OTHER; note = 2'-O-methyl modified nucleotide
  modified_base 77: mod_base = OTHER; note = 2'-O-methyl modified nucleotide
  modified_base 78: mod_base = OTHER; note = 2'-O-methyl modified nucleotide
  modified_base 79: mod_base = OTHER; note = 2'-O-methyl modified nucleotide
  modified_base 80: mod_base = OTHER; note = 2'-O-methyl modified nucleotide
  modified_base 81: mod_base = OTHER; note = 2'-O-methyl modified nucleotide
  modified_base 82: mod_base = OTHER; note = 2'-O-methyl modified nucleotide
  modified_base 83: mod_base = OTHER; note = 2'-O-methyl modified nucleotide
  modified_base 84: mod_base = OTHER; note = 2'-O-methyl modified nucleotide
  modified_base 85: mod_base = OTHER; note = 2'-O-methyl modified nucleotide
  modified_base 86: mod_base = OTHER; note = 2'-O-methyl modified nucleotide
  modified_base 87: mod_base = OTHER; note = 2'-O-methyl modified nucleotide
  modified_base 88: mod_base = OTHER; note = 2'-O-methyl modified nucleotide
  modified_base 89: mod_base = OTHER; note = 2'-O-methyl modified nucleotide
  modified_base 90: mod_base = OTHER; note = 2'-O-methyl modified nucleotide
  modified_base 91: mod_base = OTHER; note = 2'-O-methyl modified nucleotide
  modified_base 92: mod_base = OTHER; note = 2'-O-methyl modified nucleotide
  modified_base 93: mod_base = OTHER; note = 2'-O-methyl modified nucleotide
  modified_base 94: mod_base = OTHER; note = 2'-O-methyl modified nucleotide
  modified_base 95: mod_base = OTHER; note = 2'-O-methyl modified nucleotide
  modified_base 96: mod_base = OTHER; note = 2'-O-methyl modified nucleotide
  modified_base 97: mod_base = OTHER; note = 2'-O-methyl modified nucleotide with phosphorothioate linkage
  modified_base 98: mod_base = OTHER; note = 2'-O-methyl modified nucleotide with phosphorothioate linkage
  modified_base 99: mod_base = OTHER; note = 2'-O-methyl modified nucleotide with phosphorothioate linkage
  modified_base 100: mod_base = OTHER; note = 2'-O-methyl modified nucleotide
  misc_difference 97..100: note = This region may encompass 0-4 nucleotides

SEQ ID NO: 2304 - RNA, 100 nt, synthetic construct; identical to SEQ ID NO: 1304
  source 1..100: mol_type = other RNA
  modified_base 1: mod_base = OTHER; note = 2'-O-methyl modified nucleotide with phosphorothioate linkage
  modified_base 2: mod_base = OTHER; note = 2'-O-methyl modified nucleotide with phosphorothioate linkage
  modified_base 3: mod_base = OTHER; note = 2'-O-methyl modified nucleotide with phosphorothioate linkage
  modified_base 29: mod_base = OTHER; note = 2'-O-methyl modified nucleotide
  modified_base 30: mod_base = OTHER; note = 2'-O-methyl modified nucleotide
  modified_base 31: mod_base = OTHER; note = 2'-O-methyl modified nucleotide
  modified_base 32: mod_base = OTHER; note = 2'-O-methyl modified nucleotide
  modified_base 33: mod_base = OTHER; note = 2'-O-methyl modified nucleotide
  modified_base 34: mod_base = OTHER; note = 2'-O-methyl modified nucleotide
  modified_base 35: mod_base = OTHER; note = 2'-O-methyl modified nucleotide
  modified_base 36: mod_base = OTHER; note = 2'-O-methyl modified nucleotide
  modified_base 37: mod_base = OTHER; note = 2'-O-methyl modified nucleotide
  modified_base 38: mod_base = OTHER; note = 2'-O-methyl modified nucleotide
  modified_base 39: mod_base = OTHER; note = 2'-O-methyl modified nucleotide
  modified_base 40: mod_base = OTHER; note = 2'-O-methyl modified nucleotide
  modified_base 69: mod_base = OTHER; note = 2'-O-methyl modified nucleotide
  modified_base 70: mod_base = OTHER; note = 2'-O-methyl modified nucleotide
  modified_base 71: mod_base = OTHER; note = 2'-O-methyl modified nucleotide
  modified_base 72: mod_base = OTHER; note = 2'-O-methyl modified nucleotide
  modified_base 73: mod_base = OTHER; note = 2'-O-methyl modified nucleotide
  modified_base 74: mod_base = OTHER; note = 2'-O-methyl modified nucleotide
  modified_base 75: mod_base = OTHER; note = 2'-O-methyl modified nucleotide
  modified_base 76: mod_base = OTHER; note = 2'-O-methyl modified nucleotide
  modified_base 77: mod_base = OTHER; note = 2'-O-methyl modified nucleotide
  modified_base 78: mod_base = OTHER; note = 2'-O-methyl modified nucleotide
  modified_base 79: mod_base = OTHER; note = 2'-O-methyl modified nucleotide
  modified_base 80: mod_base = OTHER; note = 2'-O-methyl modified nucleotide
  modified_base 81: mod_base = OTHER; note = 2'-O-methyl modified nucleotide
  modified_base 82: mod_base = OTHER; note = 2'-O-methyl modified nucleotide
  modified_base 83: mod_base = OTHER; note = 2'-O-methyl modified nucleotide
  modified_base 84: mod_base = OTHER; note = 2'-O-methyl modified nucleotide
  modified_base 85: mod_base = OTHER; note = 2'-O-methyl modified nucleotide
  modified_base 86: mod_base = OTHER; note = 2'-O-methyl modified nucleotide
  modified_base 87: mod_base = OTHER; note = 2'-O-methyl modified nucleotide
  modified_base 88: mod_base = OTHER; note = 2'-O-methyl modified nucleotide
  modified_base 89: mod_base = OTHER; note = 2'-O-methyl modified nucleotide
  modified_base 90: mod_base = OTHER; note = 2'-O-methyl modified nucleotide
  modified_base 91: mod_base = OTHER; note = 2'-O-methyl modified nucleotide
  modified_base 92: mod_base = OTHER; note = 2'-O-methyl modified nucleotide
  modified_base 93: mod_base = OTHER; note = 2'-O-methyl modified nucleotide
  modified_base 94: mod_base = OTHER; note = 2'-O-methyl modified nucleotide
  modified_base 95: mod_base = OTHER; note = 2'-O-methyl modified nucleotide
  modified_base 96: mod_base = OTHER; note = 2'-O-methyl modified nucleotide
  modified_base 97: mod_base = OTHER; note = 2'-O-methyl modified nucleotide with phosphorothioate linkage
  modified_base 98: mod_base = OTHER; note = 2'-O-methyl modified nucleotide with phosphorothioate linkage
  modified_base 99: mod_base = OTHER; note = 2'-O-methyl modified nucleotide with phosphorothioate linkage
  modified_base 100: mod_base = OTHER; note = 2'-O-methyl modified nucleotide
  misc_difference 97..100: note = This region may encompass 0-4 nucleotides

SEQ ID NO: 2305 - RNA, 100 nt, synthetic construct; identical to SEQ ID NO: 1305
  source 1..100: mol_type = other RNA
  modified_base 1: mod_base = OTHER; note = 2'-O-methyl modified nucleotide with phosphorothioate linkage
  modified_base 2: mod_base = OTHER; note = 2'-O-methyl modified nucleotide with phosphorothioate linkage
  modified_base 3: mod_base = OTHER; note = 2'-O-methyl modified nucleotide with phosphorothioate linkage
  modified_base 29: mod_base = OTHER; note = 2'-O-methyl modified nucleotide
  modified_base 30: mod_base = OTHER; note = 2'-O-methyl modified nucleotide
  modified_base 31: mod_base = OTHER; note = 2'-O-methyl modified nucleotide
  modified_base 32: mod_base = OTHER; note = 2'-O-methyl modified nucleotide
  modified_base 33: mod_base = OTHER; note = 2'-O-methyl modified nucleotide
  modified_base 34: mod_base = OTHER; note = 2'-O-methyl modified nucleotide
  modified_base 35: mod_base = OTHER; note = 2'-O-methyl modified nucleotide
  modified_base 36: mod_base = OTHER; note = 2'-O-methyl modified nucleotide
  modified_base 37: mod_base = OTHER; note = 2'-O-methyl modified nucleotide
  modified_base 38: mod_base = OTHER; note = 2'-O-methyl modified nucleotide
  modified_base 39: mod_base = OTHER; note = 2'-O-methyl modified nucleotide
  modified_base 40: mod_base = OTHER; note = 2'-O-methyl modified nucleotide
  modified_base 69: mod_base = OTHER; note = 2'-O-methyl modified nucleotide
  modified_base 70: mod_base = OTHER; note = 2'-O-methyl modified nucleotide
  modified_base 71: mod_base = OTHER; note = 2'-O-methyl modified nucleotide
  modified_base 72: mod_base = OTHER; note = 2'-O-methyl modified nucleotide
  modified_base 73: mod_base = OTHER; note = 2'-O-methyl modified nucleotide
  modified_base 74: mod_base = OTHER; note = 2'-O-methyl modified nucleotide
  modified_base 75: mod_base = OTHER; note = 2'-O-methyl modified nucleotide
  modified_base 76: mod_base = OTHER; note = 2'-O-methyl modified nucleotide
  modified_base 77: mod_base = OTHER; note = 2'-O-methyl modified nucleotide
  modified_base 78: mod_base = OTHER; note = 2'-O-methyl modified nucleotide
  modified_base 79: mod_base = OTHER; note = 2'-O-methyl modified nucleotide
  modified_base 80: mod_base = OTHER; note = 2'-O-methyl modified nucleotide
  modified_base 81: mod_base = OTHER; note = 2'-O-methyl modified nucleotide
  modified_base 82: mod_base = OTHER; note = 2'-O-methyl modified nucleotide
  modified_base 83: mod_base = OTHER; note = 2'-O-methyl modified nucleotide
  modified_base 84: mod_base = OTHER; note = 2'-O-methyl modified nucleotide
  modified_base 85: mod_base = OTHER; note = 2'-O-methyl modified nucleotide
  modified_base 86: mod_base = OTHER; note = 2'-O-methyl modified nucleotide
  modified_base 87: mod_base = OTHER; note = 2'-O-methyl modified nucleotide
  modified_base 88: mod_base = OTHER; note = 2'-O-methyl modified nucleotide
  modified_base 89: mod_base = OTHER; note = 2'-O-methyl modified nucleotide
  modified_base 90: mod_base = OTHER; note = 2'-O-methyl modified nucleotide
  modified_base 91: mod_base = OTHER; note = 2'-O-methyl modified nucleotide
  modified_base 92: mod_base = OTHER; note = 2'-O-methyl modified nucleotide
  modified_base 93: mod_base = OTHER; note = 2'-O-methyl modified nucleotide
  modified_base 94: mod_base = OTHER; note = 2'-O-methyl modified nucleotide
  modified_base 95: mod_base = OTHER; note = 2'-O-methyl modified nucleotide
  modified_base 96: mod_base = OTHER; note = 2'-O-methyl modified nucleotide
  modified_base 97: mod_base = OTHER; note = 2'-O-methyl modified nucleotide with phosphorothioate linkage
  modified_base 98: mod_base = OTHER; note = 2'-O-methyl modified nucleotide with phosphorothioate linkage
  modified_base 99: mod_base = OTHER; note = 2'-O-methyl modified nucleotide with phosphorothioate linkage
  modified_base 100: mod_base = OTHER; note = 2'-O-methyl modified nucleotide
  misc_difference 97..100: note = This region may encompass 0-4 nucleotides

SEQ ID NO: 2306 - RNA, 100 nt, synthetic construct; identical to SEQ ID NO: 1306
  source 1..100: mol_type = other RNA
  modified_base 1: mod_base = OTHER; note = 2'-O-methyl modified nucleotide with phosphorothioate linkage
  modified_base 2: mod_base = OTHER; note = 2'-O-methyl modified nucleotide with phosphorothioate linkage
  modified_base 3: mod_base = OTHER; note = 2'-O-methyl modified nucleotide with phosphorothioate linkage
  modified_base 29: mod_base = OTHER; note = 2'-O-methyl modified nucleotide
  modified_base 30: mod_base = OTHER; note = 2'-O-methyl modified nucleotide
  modified_base 31: mod_base = OTHER; note = 2'-O-methyl modified nucleotide
  modified_base 32: mod_base = OTHER; note = 2'-O-methyl modified nucleotide
  modified_base 33: mod_base = OTHER; note = 2'-O-methyl modified nucleotide
  modified_base 34: mod_base = OTHER; note = 2'-O-methyl modified nucleotide
  modified_base 35: mod_base = OTHER; note = 2'-O-methyl modified nucleotide
  modified_base 36: mod_base = OTHER; note = 2'-O-methyl modified nucleotide
  modified_base 37: mod_base = OTHER; note = 2'-O-methyl modified nucleotide
  modified_base 38: mod_base = OTHER; note = 2'-O-methyl modified nucleotide
  modified_base 39: mod_base = OTHER; note = 2'-O-methyl modified nucleotide
  modified_base 40: mod_base = OTHER; note = 2'-O-methyl modified nucleotide
  modified_base 69: mod_base = OTHER; note = 2'-O-methyl modified nucleotide
  modified_base 70: mod_base = OTHER; note = 2'-O-methyl modified nucleotide
  modified_base 71: mod_base = OTHER; note = 2'-O-methyl modified nucleotide
  modified_base 72: mod_base = OTHER; note = 2'-O-methyl modified nucleotide
  modified_base 73: mod_base = OTHER; note = 2'-O-methyl modified nucleotide
  modified_base 74: mod_base = OTHER; note = 2'-O-methyl modified nucleotide
  modified_base 75: mod_base = OTHER; note = 2'-O-methyl modified nucleotide
  modified_base 76: mod_base = OTHER; note = 2'-O-methyl modified nucleotide
  modified_base 77: mod_base = OTHER; note = 2'-O-methyl modified nucleotide
  modified_base 78: mod_base = OTHER; note = 2'-O-methyl modified nucleotide
  modified_base 79: mod_base = OTHER; note = 2'-O-methyl modified nucleotide
  modified_base 80: mod_base = OTHER; note = 2'-O-methyl modified nucleotide
  modified_base 81: mod_base = OTHER; note = 2'-O-methyl modified nucleotide
  modified_base 82: mod_base = OTHER; note = 2'-O-methyl modified nucleotide
  modified_base 83: mod_base = OTHER; note = 2'-O-methyl modified nucleotide
  modified_base 84: mod_base = OTHER; note = 2'-O-methyl modified nucleotide
  modified_base 85: mod_base = OTHER; note = 2'-O-methyl modified nucleotide
  modified_base 86: mod_base = OTHER; note = 2'-O-methyl modified nucleotide
  modified_base 87: mod_base = OTHER; note = 2'-O-methyl modified nucleotide
  modified_base 88: mod_base = OTHER; note = 2'-O-methyl modified nucleotide
  modified_base 89: mod_base = OTHER; note = 2'-O-methyl modified nucleotide
  modified_base 90: mod_base = OTHER; note = 2'-O-methyl modified nucleotide
  modified_base 91: mod_base = OTHER; note = 2'-O-methyl modified nucleotide
  modified_base 92: mod_base = OTHER; note = 2'-O-methyl modified nucleotide
  modified_base 93: mod_base = OTHER; note = 2'-O-methyl modified nucleotide
  modified_base 94: mod_base = OTHER; note = 2'-O-methyl modified nucleotide
  modified_base 95: mod_base = OTHER; note = 2'-O-methyl modified nucleotide
  modified_base 96: mod_base = OTHER; note = 2'-O-methyl modified nucleotide
  modified_base 97: mod_base = OTHER; note = 2'-O-methyl modified nucleotide with phosphorothioate linkage
  modified_base 98: mod_base = OTHER; note = 2'-O-methyl modified nucleotide with phosphorothioate linkage
  modified_base 99: mod_base = OTHER; note = 2'-O-methyl modified nucleotide with phosphorothioate linkage
  modified_base 100: mod_base = OTHER; note = 2'-O-methyl modified nucleotide
  misc_difference 97..100: note = This region may encompass 0-4 nucleotides

SEQ ID NO: 2307 - RNA, 100 nt, synthetic construct; identical to SEQ ID NO: 1307
  source 1..100: mol_type = other RNA
  modified_base 1: mod_base = OTHER; note = 2'-O-methyl modified nucleotide with phosphorothioate linkage
  modified_base 2: mod_base = OTHER; note = 2'-O-methyl modified nucleotide with phosphorothioate linkage
  modified_base 3: mod_base = OTHER; note = 2'-O-methyl modified nucleotide with phosphorothioate linkage
  modified_base 29: mod_base = OTHER; note = 2'-O-methyl modified nucleotide
  modified_base 30: mod_base = OTHER; note = 2'-O-methyl modified nucleotide
  modified_base 31: mod_base = OTHER; note = 2'-O-methyl modified nucleotide
  modified_base 32: mod_base = OTHER; note = 2'-O-methyl modified nucleotide
  modified_base 33: mod_base = OTHER; note = 2'-O-methyl modified nucleotide
  modified_base 34: mod_base = OTHER; note = 2'-O-methyl modified nucleotide
  modified_base 35: mod_base = OTHER; note = 2'-O-methyl modified nucleotide
  modified_base 36: mod_base = OTHER; note = 2'-O-methyl modified nucleotide
  modified_base 37: mod_base = OTHER; note = 2'-O-methyl modified nucleotide
  modified_base 38: mod_base = OTHER; note = 2'-O-methyl modified nucleotide
  modified_base 39: mod_base = OTHER; note = 2'-O-methyl modified nucleotide
  modified_base 40: mod_base = OTHER; note = 2'-O-methyl modified nucleotide
  modified_base 69: mod_base = OTHER; note = 2'-O-methyl modified nucleotide
  modified_base 70: mod_base = OTHER; note = 2'-O-methyl modified nucleotide
  modified_base 71: mod_base = OTHER; note = 2'-O-methyl modified nucleotide
  modified_base 72: mod_base = OTHER; note = 2'-O-methyl modified nucleotide
  modified_base 73: mod_base = OTHER; note = 2'-O-methyl modified nucleotide
  modified_base 74: mod_base = OTHER; note = 2'-O-methyl modified nucleotide
  modified_base 75: mod_base = OTHER; note = 2'-O-methyl modified nucleotide
  modified_base 76: mod_base = OTHER; note = 2'-O-methyl modified nucleotide
  modified_base 77: mod_base = OTHER; note = 2'-O-methyl modified nucleotide
  modified_base 78: mod_base = OTHER; note = 2'-O-methyl modified nucleotide
  modified_base 79: mod_base = OTHER; note = 2'-O-methyl modified nucleotide
  modified_base 80: mod_base = OTHER; note = 2'-O-methyl modified nucleotide
  modified_base 81: mod_base = OTHER; note = 2'-O-methyl modified nucleotide
  modified_base 82: mod_base = OTHER; note = 2'-O-methyl modified nucleotide
  modified_base 83: mod_base = OTHER; note = 2'-O-methyl modified nucleotide
  modified_base 84: mod_base = OTHER; note = 2'-O-methyl modified nucleotide
  modified_base 85: mod_base = OTHER; note = 2'-O-methyl modified nucleotide
  modified_base 86: mod_base = OTHER; note = 2'-O-methyl modified nucleotide
  modified_base 87: mod_base = OTHER; note = 2'-O-methyl modified nucleotide
  modified_base 88: mod_base = OTHER; note = 2'-O-methyl modified nucleotide
  modified_base 89: mod_base = OTHER; note = 2'-O-methyl modified nucleotide
  modified_base 90: mod_base = OTHER; note = 2'-O-methyl modified nucleotide
  modified_base 91: mod_base = OTHER; note = 2'-O-methyl modified nucleotide
  modified_base 92: mod_base = OTHER; note = 2'-O-methyl modified nucleotide
  modified_base 93: mod_base = OTHER; note = 2'-O-methyl modified nucleotide
  modified_base 94: mod_base = OTHER; note = 2'-O-methyl modified nucleotide
  modified_base 95: mod_base = OTHER; note = 2'-O-methyl modified nucleotide
  modified_base 96: mod_base = OTHER; note = 2'-O-methyl modified nucleotide
  modified_base 97: mod_base = OTHER; note = 2'-O-methyl modified nucleotide with phosphorothioate linkage
  modified_base 98: mod_base = OTHER; note = 2'-O-methyl modified nucleotide with phosphorothioate linkage
  modified_base 99: mod_base = OTHER; note = 2'-O-methyl modified nucleotide with phosphorothioate linkage
  modified_base 100: mod_base = OTHER; note = 2'-O-methyl modified nucleotide
  misc_difference 97..100: note = This region may encompass 0-4 nucleotides

SEQ ID NO: 2308 - RNA, 100 nt, synthetic construct; identical to SEQ ID NO: 1308
  source 1..100: mol_type = other RNA
  modified_base 1: mod_base = OTHER; note = 2'-O-methyl modified nucleotide with phosphorothioate linkage
  modified_base 2: mod_base = OTHER; note = 2'-O-methyl modified nucleotide with phosphorothioate linkage
  modified_base 3: mod_base = OTHER; note = 2'-O-methyl modified nucleotide with phosphorothioate linkage
  modified_base 29: mod_base = OTHER; note = 2'-O-methyl modified nucleotide
  modified_base 30: mod_base = OTHER; note = 2'-O-methyl modified nucleotide
  modified_base 31: mod_base = OTHER; note = 2'-O-methyl modified nucleotide
  modified_base 32: mod_base = OTHER; note = 2'-O-methyl modified nucleotide
  modified_base 33: mod_base = OTHER; note = 2'-O-methyl modified nucleotide
  modified_base 34: mod_base = OTHER; note = 2'-O-methyl modified nucleotide
  modified_base 35: mod_base = OTHER; note = 2'-O-methyl modified nucleotide
  modified_base 36: mod_base = OTHER; note = 2'-O-methyl modified nucleotide
  modified_base 37: mod_base = OTHER; note = 2'-O-methyl modified nucleotide
  modified_base 38: mod_base = OTHER; note = 2'-O-methyl modified nucleotide
  modified_base 39: mod_base = OTHER; note = 2'-O-methyl modified nucleotide
  modified_base 40: mod_base = OTHER; note = 2'-O-methyl modified nucleotide
  modified_base 69: mod_base = OTHER; note = 2'-O-methyl modified nucleotide
  modified_base 70: mod_base = OTHER; note = 2'-O-methyl modified nucleotide
  modified_base 71: mod_base = OTHER; note = 2'-O-methyl modified nucleotide
  modified_base 72: mod_base = OTHER; note = 2'-O-methyl modified nucleotide
  modified_base 73: mod_base = OTHER; note = 2'-O-methyl modified nucleotide
  modified_base 74: mod_base = OTHER; note = 2'-O-methyl modified nucleotide
  modified_base 75: mod_base = OTHER; note = 2'-O-methyl modified nucleotide
  modified_base 76: mod_base = OTHER; note = 2'-O-methyl modified nucleotide
  modified_base 77: mod_base = OTHER; note = 2'-O-methyl modified nucleotide
  modified_base 78: mod_base = OTHER; note = 2'-O-methyl modified nucleotide
  modified_base 79: mod_base = OTHER; note = 2'-O-methyl modified nucleotide
  modified_base 80: mod_base = OTHER; note = 2'-O-methyl modified nucleotide
  modified_base 81: mod_base = OTHER; note = 2'-O-methyl modified nucleotide
  modified_base 82: mod_base = OTHER; note = 2'-O-methyl modified nucleotide
  modified_base 83: mod_base = OTHER; note = 2'-O-methyl modified nucleotide
  modified_base 84: mod_base = OTHER; note = 2'-O-methyl modified nucleotide
  modified_base 85: mod_base = OTHER; note = 2'-O-methyl modified nucleotide
  modified_base 86: mod_base = OTHER; note = 2'-O-methyl modified nucleotide
  modified_base 87: mod_base = OTHER; note = 2'-O-methyl modified nucleotide
  modified_base 88: mod_base = OTHER; note = 2'-O-methyl modified nucleotide
  modified_base 89: mod_base = OTHER; note = 2'-O-methyl modified nucleotide
  modified_base 90: mod_base = OTHER; note = 2'-O-methyl modified nucleotide
  modified_base 91: mod_base = OTHER; note = 2'-O-methyl modified nucleotide
  modified_base 92: mod_base = OTHER; note = 2'-O-methyl modified nucleotide
  modified_base 93: mod_base = OTHER; note = 2'-O-methyl modified nucleotide
  modified_base 94: mod_base = OTHER; note = 2'-O-methyl modified nucleotide
  modified_base 95: mod_base = OTHER; note = 2'-O-methyl modified nucleotide
  modified_base 96: mod_base = OTHER; note = 2'-O-methyl modified nucleotide
  modified_base 97: mod_base = OTHER; note = 2'-O-methyl modified nucleotide with phosphorothioate linkage
  modified_base 98: mod_base = OTHER; note = 2'-O-methyl modified nucleotide with phosphorothioate linkage
  modified_base 99: mod_base = OTHER; note = 2'-O-methyl modified nucleotide with phosphorothioate linkage
  modified_base 100: mod_base = OTHER; note = 2'-O-methyl modified nucleotide
  misc_difference 97..100: note = This region may encompass 0-4 nucleotides

SEQ ID NO: 2309 - RNA, 100 nt, synthetic construct; identical to SEQ ID NO: 1309
  source 1..100: mol_type = other RNA
  modified_base 1: mod_base = OTHER; note = 2'-O-methyl modified nucleotide with phosphorothioate linkage
  modified_base 2: mod_base = OTHER; note = 2'-O-methyl modified nucleotide with phosphorothioate linkage
  modified_base 3: mod_base = OTHER; note = 2'-O-methyl modified nucleotide with phosphorothioate linkage
  modified_base 29: mod_base = OTHER; note = 2'-O-methyl modified nucleotide
  modified_base 30: mod_base = OTHER; note = 2'-O-methyl modified nucleotide
  modified_base 31: mod_base = OTHER; note = 2'-O-methyl modified nucleotide
  modified_base 32: mod_base = OTHER; note = 2'-O-methyl modified nucleotide
  modified_base 33: mod_base = OTHER; note = 2'-O-methyl modified nucleotide
  modified_base 34: mod_base = OTHER; note = 2'-O-methyl modified nucleotide
  modified_base 35: mod_base = OTHER; note = 2'-O-methyl modified nucleotide
  modified_base 36: mod_base = OTHER; note = 2'-O-methyl modified nucleotide
  modified_base 37: mod_base = OTHER; note = 2'-O-methyl modified nucleotide
  modified_base 38: mod_base = OTHER; note = 2'-O-methyl modified nucleotide
  modified_base 39: mod_base = OTHER; note = 2'-O-methyl modified nucleotide
  modified_base 40: mod_base = OTHER; note = 2'-O-methyl modified nucleotide
  modified_base 69: mod_base = OTHER; note = 2'-O-methyl modified nucleotide
  modified_base 70: mod_base = OTHER; note = 2'-O-methyl modified nucleotide
  modified_base 71: mod_base = OTHER; note = 2'-O-methyl modified nucleotide
  modified_base 72: mod_base = OTHER; note = 2'-O-methyl modified nucleotide
  modified_base 73: mod_base = OTHER; note = 2'-O-methyl modified nucleotide
  modified_base 74: mod_base = OTHER; note = 2'-O-methyl modified nucleotide
  modified_base 75: mod_base = OTHER; note = 2'-O-methyl modified nucleotide
  modified_base 76: mod_base = OTHER; note = 2'-O-methyl modified nucleotide
  modified_base 77: mod_base = OTHER; note = 2'-O-methyl modified nucleotide
  modified_base 78: mod_base = OTHER; note = 2'-O-methyl modified nucleotide
  modified_base 79: mod_base = OTHER; note = 2'-O-methyl modified nucleotide
  modified_base 80: mod_base = OTHER; note = 2'-O-methyl modified nucleotide
  modified_base 81: mod_base = OTHER; note = 2'-O-methyl modified nucleotide
  modified_base 82: mod_base = OTHER; note = 2'-O-methyl modified nucleotide
  modified_base 83: mod_base = OTHER; note = 2'-O-methyl modified nucleotide
  modified_base 84: mod_base = OTHER; note = 2'-O-methyl modified nucleotide
  modified_base 85: mod_base = OTHER; note = 2'-O-methyl modified nucleotide
  modified_base 86: mod_base = OTHER; note = 2'-O-methyl modified nucleotide
  modified_base 87: mod_base = OTHER; note = 2'-O-methyl modified nucleotide
  modified_base 88: mod_base = OTHER; note = 2'-O-methyl modified nucleotide
  modified_base 89: mod_base = OTHER; note = 2'-O-methyl modified nucleotide
  modified_base 90: mod_base = OTHER; note = 2'-O-methyl modified nucleotide
  modified_base 91: mod_base = OTHER; note = 2'-O-methyl modified nucleotide
  modified_base 92: mod_base = OTHER; note = 2'-O-methyl modified nucleotide
  modified_base 93: mod_base = OTHER; note = 2'-O-methyl modified nucleotide
  modified_base 94: mod_base = OTHER; note = 2'-O-methyl modified nucleotide
  modified_base 95: mod_base = OTHER; note = 2'-O-methyl modified nucleotide
  modified_base 96: mod_base = OTHER; note = 2'-O-methyl modified nucleotide
  modified_base 97: mod_base = OTHER; note = 2'-O-methyl modified nucleotide with phosphorothioate linkage
  modified_base 98: mod_base = OTHER; note = 2'-O-methyl modified nucleotide with phosphorothioate linkage
  modified_base 99: mod_base = OTHER; note = 2'-O-methyl modified nucleotide with phosphorothioate linkage
  modified_base 100: mod_base = OTHER; note = 2'-O-methyl modified nucleotide
  misc_difference 97..100: note = This region may encompass 0-4 nucleotides

SEQ ID NO: 2310 - RNA, 100 nt, synthetic construct; identical to SEQ ID NO: 1310
  source 1..100: mol_type = other RNA
  modified_base 1: mod_base = OTHER; note = 2'-O-methyl modified nucleotide with phosphorothioate linkage
  modified_base 2: mod_base = OTHER; note = 2'-O-methyl modified nucleotide with phosphorothioate linkage
  modified_base 3: mod_base = OTHER; note = 2'-O-methyl modified nucleotide with phosphorothioate linkage
  modified_base 29: mod_base = OTHER; note = 2'-O-methyl modified nucleotide
  modified_base 30: mod_base = OTHER; note = 2'-O-methyl modified nucleotide
  modified_base 31: mod_base = OTHER; note = 2'-O-methyl modified nucleotide
  modified_base 32: mod_base = OTHER; note = 2'-O-methyl modified nucleotide
  modified_base 33: mod_base = OTHER; note = 2'-O-methyl modified nucleotide
  modified_base 34: mod_base = OTHER; note = 2'-O-methyl modified nucleotide
  modified_base 35: mod_base = OTHER; note = 2'-O-methyl modified nucleotide
  modified_base 36: mod_base = OTHER; note = 2'-O-methyl modified nucleotide
  modified_base 37: mod_base = OTHER; note = 2'-O-methyl modified nucleotide
  modified_base 38: mod_base = OTHER; note = 2'-O-methyl modified nucleotide
  modified_base 39: mod_base = OTHER; note = 2'-O-methyl modified nucleotide
  modified_base 40: mod_base = OTHER; note = 2'-O-methyl modified nucleotide
  modified_base 69: mod_base = OTHER; note = 2'-O-methyl modified nucleotide
  modified_base 70: mod_base = OTHER; note = 2'-O-methyl modified nucleotide
  modified_base 71: mod_base = OTHER; note = 2'-O-methyl modified nucleotide
  modified_base 72: mod_base = OTHER; note = 2'-O-methyl modified nucleotide
  modified_base 73: mod_base = OTHER; note = 2'-O-methyl modified nucleotide
  modified_base 74: mod_base = OTHER; note = 2'-O-methyl modified nucleotide
  modified_base 75: mod_base = OTHER; note = 2'-O-methyl modified nucleotide
  modified_base 76: mod_base = OTHER; note = 2'-O-methyl modified nucleotide
  modified_base 77: mod_base = OTHER; note = 2'-O-methyl modified nucleotide
  modified_base 78: mod_base = OTHER; note = 2'-O-methyl modified nucleotide
  modified_base 79: mod_base = OTHER; note = 2'-O-methyl modified nucleotide
  modified_base 80: mod_base = OTHER; note = 2'-O-methyl modified nucleotide
  modified_base 81: mod_base = OTHER; note = 2'-O-methyl modified nucleotide
  modified_base 82: mod_base = OTHER; note = 2'-O-methyl modified nucleotide
  modified_base 83: mod_base = OTHER; note = 2'-O-methyl modified nucleotide
  modified_base 84: mod_base = OTHER; note = 2'-O-methyl modified nucleotide
  modified_base 85: mod_base = OTHER; note = 2'-O-methyl modified nucleotide
  modified_base 86: mod_base = OTHER; note = 2'-O-methyl modified nucleotide
  modified_base 87: mod_base = OTHER; note = 2'-O-methyl modified nucleotide
  modified_base 88: mod_base = OTHER; note = 2'-O-methyl modified nucleotide
  modified_base 89: mod_base = OTHER; note = 2'-O-methyl modified nucleotide
  modified_base 90: mod_base = OTHER; note = 2'-O-methyl modified nucleotide
  modified_base 91: mod_base = OTHER; note = 2'-O-methyl modified nucleotide
  modified_base 92: mod_base = OTHER; note = 2'-O-methyl modified nucleotide
  modified_base 93: mod_base = OTHER; note = 2'-O-methyl modified nucleotide
  modified_base 94: mod_base = OTHER; note = 2'-O-methyl modified nucleotide
  modified_base 95: mod_base = OTHER; note = 2'-O-methyl modified nucleotide
  modified_base 96: mod_base = OTHER; note = 2'-O-methyl modified nucleotide
  modified_base 97: mod_base = OTHER; note = 2'-O-methyl modified nucleotide with phosphorothioate linkage
  modified_base 98: mod_base = OTHER; note = 2'-O-methyl modified nucleotide with phosphorothioate linkage
  modified_base 99: mod_base = OTHER; note = 2'-O-methyl modified nucleotide with phosphorothioate linkage
  modified_base 100: mod_base = OTHER; note = 2'-O-methyl modified nucleotide
  misc_difference 97..100: note = This region may encompass 0-4 nucleotides

SEQ ID NO: 2311 - RNA, 100 nt, synthetic construct; identical to SEQ ID NO: 1311
  source 1..100: mol_type = other RNA
  modified_base 1: mod_base = OTHER; note = 2'-O-methyl modified nucleotide with phosphorothioate linkage
  modified_base 2: mod_base = OTHER; note = 2'-O-methyl modified nucleotide with phosphorothioate linkage
  modified_base 3: mod_base = OTHER; note = 2'-O-methyl modified nucleotide with phosphorothioate linkage
  modified_base 29: mod_base = OTHER; note = 2'-O-methyl modified nucleotide
  modified_base 30: mod_base = OTHER; note = 2'-O-methyl modified nucleotide
  modified_base 31: mod_base = OTHER; note = 2'-O-methyl modified nucleotide
  modified_base 32: mod_base = OTHER; note = 2'-O-methyl modified nucleotide
  modified_base 33: mod_base = OTHER; note = 2'-O-methyl modified nucleotide
  modified_base 34: mod_base = OTHER; note = 2'-O-methyl modified nucleotide
  modified_base 35: mod_base = OTHER; note = 2'-O-methyl modified nucleotide
  modified_base 36: mod_base = OTHER; note = 2'-O-methyl modified nucleotide
  modified_base 37: mod_base = OTHER; note = 2'-O-methyl modified nucleotide
  modified_base 38: mod_base = OTHER; note = 2'-O-methyl modified nucleotide
  modified_base 39: mod_base = OTHER; note = 2'-O-methyl modified nucleotide
  modified_base 40: mod_base = OTHER; note = 2'-O-methyl modified nucleotide
  modified_base 69: mod_base = OTHER; note = 2'-O-methyl modified nucleotide
  modified_base 70: mod_base = OTHER; note = 2'-O-methyl modified nucleotide
  modified_base 71: mod_base = OTHER; note = 2'-O-methyl modified nucleotide
  modified_base 72: mod_base = OTHER; note = 2'-O-methyl modified nucleotide
  modified_base 73: mod_base = OTHER; note = 2'-O-methyl modified nucleotide
  modified_base 74: mod_base = OTHER; note = 2'-O-methyl modified nucleotide
  modified_base 75: mod_base = OTHER; note = 2'-O-methyl modified nucleotide
  modified_base 76: mod_base = OTHER; note = 2'-O-methyl modified nucleotide
  modified_base 77: mod_base = OTHER; note = 2'-O-methyl modified nucleotide
  modified_base 78: mod_base = OTHER; note = 2'-O-methyl modified nucleotide
  modified_base 79: mod_base = OTHER; note = 2'-O-methyl modified nucleotide
  modified_base 80: mod_base = OTHER; note = 2'-O-methyl modified nucleotide
  modified_base 81: mod_base = OTHER; note = 2'-O-methyl modified nucleotide
  modified_base 82: mod_base = OTHER; note = 2'-O-methyl modified nucleotide
  modified_base 83: mod_base = OTHER; note = 2'-O-methyl modified nucleotide
  modified_base 84: mod_base = OTHER; note = 2'-O-methyl modified nucleotide
  modified_base 85: mod_base = OTHER; note = 2'-O-methyl modified nucleotide
  modified_base 86: mod_base = OTHER; note = 2'-O-methyl modified nucleotide
  modified_base 87: mod_base = OTHER; note = 2'-O-methyl modified nucleotide
  modified_base 88: mod_base = OTHER; note = 2'-O-methyl modified nucleotide
  modified_base 89: mod_base = OTHER; note = 2'-O-methyl modified nucleotide
  modified_base 90: mod_base = OTHER; note = 2'-O-methyl modified nucleotide
  modified_base 91: mod_base = OTHER; note = 2'-O-methyl modified nucleotide
  modified_base 92: mod_base = OTHER; note = 2'-O-methyl modified nucleotide
  modified_base 93: mod_base = OTHER; note = 2'-O-methyl modified nucleotide
  modified_base 94: mod_base = OTHER; note = 2'-O-methyl modified nucleotide
  modified_base 95: mod_base = OTHER; note = 2'-O-methyl modified nucleotide
  modified_base 96: mod_base = OTHER; note = 2'-O-methyl modified nucleotide
  modified_base 97: mod_base = OTHER; note = 2'-O-methyl modified nucleotide with phosphorothioate linkage
  modified_base 98: mod_base = OTHER; note = 2'-O-methyl modified nucleotide with phosphorothioate linkage
  modified_base 99: mod_base = OTHER; note = 2'-O-methyl modified nucleotide with phosphorothioate linkage
  modified_base 100: mod_base = OTHER; note = 2'-O-methyl modified nucleotide
  misc_difference 97..100: note = This region may encompass 0-4 nucleotides

SEQ ID NO: 2312 - RNA, 100 nt, synthetic construct; identical to SEQ ID NO: 1312
  source 1..100: mol_type = other RNA
  modified_base 1: mod_base = OTHER; note = 2'-O-methyl modified nucleotide with phosphorothioate linkage
  modified_base 2: mod_base = OTHER; note = 2'-O-methyl modified nucleotide with phosphorothioate linkage
  modified_base 3: mod_base = OTHER; note = 2'-O-methyl modified nucleotide with phosphorothioate linkage
  modified_base 29: mod_base = OTHER; note = 2'-O-methyl modified nucleotide
  modified_base 30: mod_base = OTHER; note = 2'-O-methyl modified nucleotide
  modified_base 31: mod_base = OTHER; note = 2'-O-methyl modified nucleotide
  modified_base 32: mod_base = OTHER; note = 2'-O-methyl modified nucleotide
  modified_base 33: mod_base = OTHER; note = 2'-O-methyl modified nucleotide
  modified_base 34: mod_base = OTHER; note = 2'-O-methyl modified nucleotide
  modified_base 35: mod_base = OTHER; note = 2'-O-methyl modified nucleotide
  modified_base 36: mod_base = OTHER; note = 2'-O-methyl modified nucleotide
  modified_base 37: mod_base = OTHER; note = 2'-O-methyl modified nucleotide
  modified_base 38: mod_base = OTHER; note = 2'-O-methyl modified nucleotide
  modified_base 39: mod_base = OTHER; note = 2'-O-methyl modified nucleotide
  modified_base 40: mod_base = OTHER; note = 2'-O-methyl modified nucleotide
  modified_base 69: mod_base = OTHER; note = 2'-O-methyl modified nucleotide
  modified_base 70: mod_base = OTHER; note = 2'-O-methyl modified nucleotide
  modified_base 71: mod_base = OTHER; note = 2'-O-methyl modified nucleotide
  modified_base 72: mod_base = OTHER; note = 2'-O-methyl modified nucleotide
  modified_base 73: mod_base = OTHER; note = 2'-O-methyl modified nucleotide
  modified_base 74: mod_base = OTHER; note = 2'-O-methyl modified nucleotide
  modified_base 75: mod_base = OTHER; note = 2'-O-methyl modified nucleotide
  modified_base 76: mod_base = OTHER; note = 2'-O-methyl modified nucleotide
  modified_base 77: mod_base = OTHER; note = 2'-O-methyl modified nucleotide
  modified_base 78: mod_base = OTHER; note = 2'-O-methyl modified nucleotide
  modified_base 79: mod_base = OTHER; note = 2'-O-methyl modified nucleotide
  modified_base 80: mod_base = OTHER; note = 2'-O-methyl modified nucleotide
  modified_base 81: mod_base = OTHER; note = 2'-O-methyl modified nucleotide
  modified_base 82: mod_base = OTHER; note = 2'-O-methyl modified nucleotide
  modified_base 83: mod_base = OTHER; note = 2'-O-methyl modified nucleotide
  modified_base 84: mod_base = OTHER; note = 2'-O-methyl modified nucleotide
  modified_base 85: mod_base = OTHER; note = 2'-O-methyl modified nucleotide
  modified_base 86: mod_base = OTHER; note = 2'-O-methyl modified nucleotide
  modified_base 87: mod_base = OTHER; note = 2'-O-methyl modified nucleotide
  modified_base 88: mod_base = OTHER; note = 2'-O-methyl modified nucleotide
  modified_base 89: mod_base = OTHER; note = 2'-O-methyl modified nucleotide
  modified_base 90: mod_base = OTHER; note = 2'-O-methyl modified nucleotide
  modified_base 91: mod_base = OTHER; note = 2'-O-methyl modified nucleotide
  modified_base 92: mod_base = OTHER; note = 2'-O-methyl modified nucleotide
  modified_base 93: mod_base = OTHER; note = 2'-O-methyl modified nucleotide
  modified_base 94: mod_base = OTHER; note = 2'-O-methyl modified nucleotide
  modified_base 95: mod_base = OTHER; note = 2'-O-methyl modified nucleotide
  modified_base 96: mod_base = OTHER; note = 2'-O-methyl modified nucleotide
  modified_base 97: mod_base = OTHER; note = 2'-O-methyl modified nucleotide with phosphorothioate linkage
  modified_base 98: mod_base = OTHER; note = 2'-O-methyl modified nucleotide with phosphorothioate linkage
  modified_base 99: mod_base = OTHER; note = 2'-O-methyl modified nucleotide with phosphorothioate linkage
  modified_base 100: mod_base = OTHER; note = 2'-O-methyl modified nucleotide
  misc_difference 97..100: note = This region may encompass 0-4 nucleotides

SEQ ID NO: 2313 - RNA, 100 nt, synthetic construct; identical to SEQ ID NO: 998
  source 1..100: mol_type = other RNA
  modified_base 1: mod_base = OTHER; note = 2'-O-methyl modified nucleotide with phosphorothioate linkage
  modified_base 2: mod_base = OTHER; note = 2'-O-methyl modified nucleotide with phosphorothioate linkage
  modified_base 3: mod_base = OTHER; note = 2'-O-methyl modified nucleotide with phosphorothioate linkage
  modified_base 29: mod_base = OTHER; note = 2'-O-methyl modified nucleotide
  modified_base 30: mod_base = OTHER; note = 2'-O-methyl modified nucleotide
  modified_base 31: mod_base = OTHER; note = 2'-O-methyl modified nucleotide
  modified_base 32: mod_base = OTHER; note = 2'-O-methyl modified nucleotide
  modified_base 33: mod_base = OTHER; note = 2'-O-methyl modified nucleotide
  modified_base 34: mod_base = OTHER; note = 2'-O-methyl modified nucleotide
  modified_base 35: mod_base = OTHER; note = 2'-O-methyl modified nucleotide
  modified_base 36: mod_base = OTHER; note = 2'-O-methyl modified nucleotide
  modified_base 37: mod_base = OTHER; note = 2'-O-methyl modified nucleotide
  modified_base 38: mod_base = OTHER; note = 2'-O-methyl modified nucleotide
  modified_base 39: mod_base = OTHER; note = 2'-O-methyl modified nucleotide
  modified_base 40: mod_base = OTHER; note = 2'-O-methyl modified nucleotide
  modified_base 69: mod_base = OTHER; note = 2'-O-methyl modified nucleotide
  modified_base 70: mod_base = OTHER; note = 2'-O-methyl modified nucleotide
  modified_base 71: mod_base = OTHER; note = 2'-O-methyl modified nucleotide
  modified_base 72: mod_base = OTHER; note = 2'-O-methyl modified nucleotide
  modified_base 73: mod_base = OTHER; note = 2'-O-methyl modified nucleotide
  modified_base 74: mod_base = OTHER; note = 2'-O-methyl modified nucleotide
  modified_base 75: mod_base = OTHER; note = 2'-O-methyl modified nucleotide
  modified_base 76: mod_base = OTHER; note = 2'-O-methyl modified nucleotide
  modified_base 77: mod_base = OTHER; note = 2'-O-methyl modified nucleotide
  modified_base 78: mod_base = OTHER; note = 2'-O-methyl modified nucleotide
  modified_base 79: mod_base = OTHER; note = 2'-O-methyl modified nucleotide
  modified_base 80: mod_base = OTHER; note = 2'-O-methyl modified nucleotide
  modified_base 81: mod_base = OTHER; note = 2'-O-methyl modified nucleotide
  modified_base 82: mod_base = OTHER; note = 2'-O-methyl modified nucleotide
  modified_base 83: mod_base = OTHER; note = 2'-O-methyl modified nucleotide
  modified_base 84: mod_base = OTHER; note = 2'-O-methyl modified nucleotide
  modified_base 85: mod_base = OTHER; note = 2'-O-methyl modified nucleotide
  modified_base 86: mod_base = OTHER; note = 2'-O-methyl modified nucleotide
  modified_base 87: mod_base = OTHER; note = 2'-O-methyl modified nucleotide
  modified_base 88: mod_base = OTHER; note = 2'-O-methyl modified nucleotide
  modified_base 89: mod_base = OTHER; note = 2'-O-methyl modified nucleotide
  modified_base 90: mod_base = OTHER; note = 2'-O-methyl modified nucleotide
  modified_base 91: mod_base = OTHER; note = 2'-O-methyl modified nucleotide
  modified_base 92: mod_base = OTHER; note = 2'-O-methyl modified nucleotide
  modified_base 93: mod_base = OTHER; note = 2'-O-methyl modified nucleotide
  modified_base 94: mod_base = OTHER; note = 2'-O-methyl modified nucleotide
  modified_base 95: mod_base = OTHER; note = 2'-O-methyl modified nucleotide
  modified_base 96: mod_base = OTHER; note = 2'-O-methyl modified nucleotide
  modified_base 97: mod_base = OTHER; note = 2'-O-methyl modified nucleotide with phosphorothioate linkage
  modified_base 98: mod_base = OTHER; note = 2'-O-methyl modified nucleotide with phosphorothioate linkage
  modified_base 99: mod_base = OTHER; note = 2'-O-methyl modified nucleotide with phosphorothioate linkage
  modified_base 100: mod_base = OTHER; note = 2'-O-methyl modified nucleotide
  misc_difference 97..100: note = This region may encompass 0-4 nucleotides

SEQ ID NO: 2314 - RNA, 100 nt, synthetic construct; identical to SEQ ID NO: 1314
  source 1..100: mol_type = other RNA
  modified_base 1: mod_base = OTHER; note = 2'-O-methyl modified nucleotide with phosphorothioate linkage
  modified_base 2: mod_base = OTHER; note = 2'-O-methyl modified nucleotide with phosphorothioate linkage
  modified_base 3: mod_base = OTHER; note = 2'-O-methyl modified nucleotide with phosphorothioate linkage
  modified_base 29: mod_base = OTHER; note = 2'-O-methyl modified nucleotide
  modified_base 30: mod_base = OTHER; note = 2'-O-methyl modified nucleotide
  modified_base 31: mod_base = OTHER; note = 2'-O-methyl modified nucleotide
  modified_base 32: mod_base = OTHER; note = 2'-O-methyl modified nucleotide
  modified_base 33: mod_base = OTHER; note = 2'-O-methyl modified nucleotide
  modified_base 34: mod_base = OTHER; note = 2'-O-methyl modified nucleotide
  modified_base 35: mod_base = OTHER; note = 2'-O-methyl modified nucleotide
  modified_base 36: mod_base = OTHER; note = 2'-O-methyl modified nucleotide
  modified_base 37: mod_base = OTHER; note = 2'-O-methyl modified nucleotide
  modified_base 38: mod_base = OTHER; note = 2'-O-methyl modified nucleotide
  modified_base 39: mod_base = OTHER; note = 2'-O-methyl modified nucleotide
  modified_base 40: mod_base = OTHER; note = 2'-O-methyl modified nucleotide
  modified_base 69: mod_base = OTHER; note = 2'-O-methyl modified nucleotide
  modified_base 70: mod_base = OTHER; note = 2'-O-methyl modified nucleotide
  modified_base 71: mod_base = OTHER; note = 2'-O-methyl modified nucleotide
  modified_base 72: mod_base = OTHER; note = 2'-O-methyl modified nucleotide
  modified_base 73: mod_base = OTHER; note = 2'-O-methyl modified nucleotide
  modified_base 74: mod_base = OTHER; note = 2'-O-methyl modified nucleotide
  modified_base 75: mod_base = OTHER; note = 2'-O-methyl modified nucleotide
  modified_base 76: mod_base = OTHER; note = 2'-O-methyl modified nucleotide
  modified_base 77: mod_base = OTHER; note = 2'-O-methyl modified nucleotide
  modified_base 78: mod_base = OTHER; note = 2'-O-methyl modified nucleotide
  modified_base 79: mod_base = OTHER; note = 2'-O-methyl modified nucleotide
  modified_base 80: mod_base = OTHER; note = 2'-O-methyl modified nucleotide
  modified_base 81: mod_base = OTHER; note = 2'-O-methyl modified nucleotide
  modified_base 82: mod_base = OTHER; note = 2'-O-methyl modified nucleotide
  modified_base 83: mod_base = OTHER; note = 2'-O-methyl modified nucleotide
  modified_base 84: mod_base = OTHER; note = 2'-O-methyl modified nucleotide
  modified_base 85: mod_base = OTHER; note = 2'-O-methyl modified nucleotide
  modified_base 86: mod_base = OTHER; note = 2'-O-methyl modified nucleotide
  modified_base 87: mod_base = OTHER; note = 2'-O-methyl modified nucleotide
  modified_base 88: mod_base = OTHER; note = 2'-O-methyl modified nucleotide
  modified_base 89: mod_base = OTHER; note = 2'-O-methyl modified nucleotide
  modified_base 90: mod_base = OTHER; note = 2'-O-methyl modified nucleotide
  modified_base 91: mod_base = OTHER; note = 2'-O-methyl modified nucleotide
  modified_base 92: mod_base = OTHER; note = 2'-O-methyl modified nucleotide
  modified_base 93: mod_base = OTHER; note = 2'-O-methyl modified nucleotide
  modified_base 94: mod_base = OTHER; note = 2'-O-methyl modified nucleotide
  modified_base 95: mod_base = OTHER; note = 2'-O-methyl modified nucleotide
  modified_base 96: mod_base = OTHER; note = 2'-O-methyl modified nucleotide
  modified_base 97: mod_base = OTHER; note = 2'-O-methyl modified nucleotide with phosphorothioate linkage
  modified_base 98: mod_base = OTHER; note = 2'-O-methyl modified nucleotide with phosphorothioate linkage
  modified_base 99: mod_base = OTHER; note = 2'-O-methyl modified nucleotide with phosphorothioate linkage
  modified_base 100: mod_base = OTHER; note = 2'-O-methyl modified nucleotide
  misc_difference 97..100: note = This region may encompass 0-4 nucleotides

SEQ ID NO: 2315 - RNA, 100 nt, synthetic construct; identical to SEQ ID NO: 1315
  source 1..100: mol_type = other RNA
  modified_base 1: mod_base = OTHER; note = 2'-O-methyl modified nucleotide with phosphorothioate linkage
  modified_base 2: mod_base = OTHER; note = 2'-O-methyl modified nucleotide with phosphorothioate linkage
  modified_base 3: mod_base = OTHER; note = 2'-O-methyl modified nucleotide with phosphorothioate linkage
  modified_base 29: mod_base = OTHER; note = 2'-O-methyl modified nucleotide
  modified_base 30: mod_base = OTHER; note = 2'-O-methyl modified nucleotide
  modified_base 31: mod_base = OTHER; note = 2'-O-methyl modified nucleotide
  modified_base 32: mod_base = OTHER; note = 2'-O-methyl modified nucleotide
  modified_base 33: mod_base = OTHER; note = 2'-O-methyl modified nucleotide
  modified_base 34: mod_base = OTHER; note = 2'-O-methyl modified nucleotide
  modified_base 35: mod_base = OTHER; note = 2'-O-methyl modified nucleotide
  modified_base 36: mod_base = OTHER; note = 2'-O-methyl modified nucleotide
  modified_base 37: mod_base = OTHER; note = 2'-O-methyl modified nucleotide
  modified_base 38: mod_base = OTHER; note = 2'-O-methyl modified nucleotide
  modified_base 39: mod_base = OTHER; note = 2'-O-methyl modified nucleotide
  modified_base 40: mod_base = OTHER; note = 2'-O-methyl modified nucleotide
  modified_base 69: mod_base = OTHER; note = 2'-O-methyl modified nucleotide
  modified_base 70: mod_base = OTHER; note = 2'-O-methyl modified nucleotide
  modified_base 71: mod_base = OTHER; note = 2'-O-methyl modified nucleotide
  modified_base 72: mod_base = OTHER; note = 2'-O-methyl modified nucleotide
  modified_base 73: mod_base = OTHER; note = 2'-O-methyl modified nucleotide
  modified_base 74: mod_base = OTHER; note = 2'-O-methyl modified nucleotide
  modified_base 75: mod_base = OTHER; note = 2'-O-methyl modified nucleotide
  modified_base 76: mod_base = OTHER; note = 2'-O-methyl modified nucleotide
  modified_base 77: mod_base = OTHER; note = 2'-O-methyl modified nucleotide
  modified_base 78: mod_base = OTHER; note = 2'-O-methyl modified nucleotide
  modified_base 79: mod_base = OTHER; note = 2'-O-methyl modified nucleotide
  modified_base 80: mod_base = OTHER; note = 2'-O-methyl modified nucleotide
  modified_base 81: mod_base = OTHER; note = 2'-O-methyl modified nucleotide
  modified_base 82: mod_base = OTHER; note = 2'-O-methyl modified nucleotide
  modified_base 83: mod_base = OTHER; note = 2'-O-methyl modified nucleotide
  modified_base 84: mod_base = OTHER; note = 2'-O-methyl modified nucleotide
  modified_base 85: mod_base = OTHER; note = 2'-O-methyl modified nucleotide
  modified_base 86: mod_base = OTHER; note = 2'-O-methyl modified nucleotide
  modified_base 87: mod_base = OTHER; note = 2'-O-methyl modified nucleotide
  modified_base 88: mod_base = OTHER; note = 2'-O-methyl modified nucleotide
  modified_base 89: mod_base = OTHER; note = 2'-O-methyl modified nucleotide
  modified_base 90: mod_base = OTHER; note = 2'-O-methyl modified nucleotide
  modified_base 91: mod_base = OTHER; note = 2'-O-methyl modified nucleotide
  modified_base 92: mod_base = OTHER; note = 2'-O-methyl modified nucleotide
  modified_base 93: mod_base = OTHER; note = 2'-O-methyl modified nucleotide
  modified_base 94: mod_base = OTHER; note = 2'-O-methyl modified nucleotide
  modified_base 95: mod_base = OTHER; note = 2'-O-methyl modified nucleotide
  modified_base 96: mod_base = OTHER; note = 2'-O-methyl modified nucleotide
  modified_base 97: mod_base = OTHER; note = 2'-O-methyl modified nucleotide with phosphorothioate linkage
  modified_base 98: mod_base = OTHER; note = 2'-O-methyl modified nucleotide with phosphorothioate linkage
  modified_base 99: mod_base = OTHER; note = 2'-O-methyl modified nucleotide with phosphorothioate linkage
  modified_base 100: mod_base = OTHER; note = 2'-O-methyl modified nucleotide
  misc_difference 97..100: note = This region may encompass 0-4 nucleotides

SEQ ID NO: 2316 - RNA, 100 nt, synthetic construct; identical to SEQ ID NO: 1316
  source 1..100: mol_type = other RNA
  modified_base 1: mod_base = OTHER; note = 2'-O-methyl modified nucleotide with phosphorothioate linkage
  modified_base 2: mod_base = OTHER; note = 2'-O-methyl modified nucleotide with phosphorothioate linkage
  modified_base 3: mod_base = OTHER; note = 2'-O-methyl modified nucleotide with phosphorothioate linkage
  modified_base 29: mod_base = OTHER; note = 2'-O-methyl modified nucleotide
  modified_base 30: mod_base = OTHER; note = 2'-O-methyl modified nucleotide
  modified_base 31: mod_base = OTHER; note = 2'-O-methyl modified nucleotide
  modified_base 32: mod_base = OTHER; note = 2'-O-methyl modified nucleotide
  modified_base 33: mod_base = OTHER; note = 2'-O-methyl modified nucleotide
  modified_base 34: mod_base = OTHER; note = 2'-O-methyl modified nucleotide
  modified_base 35: mod_base = OTHER; note = 2'-O-methyl modified nucleotide
  modified_base 36: mod_base = OTHER; note = 2'-O-methyl modified nucleotide
  modified_base 37: mod_base = OTHER; note = 2'-O-methyl modified nucleotide
  modified_base 38: mod_base = OTHER; note = 2'-O-methyl modified nucleotide
  modified_base 39: mod_base = OTHER; note = 2'-O-methyl modified nucleotide
  modified_base 40: mod_base = OTHER; note = 2'-O-methyl modified nucleotide
  modified_base 69: mod_base = OTHER; note = 2'-O-methyl modified nucleotide
  modified_base 70: mod_base = OTHER; note = 2'-O-methyl modified nucleotide
  modified_base 71: mod_base = OTHER; note = 2'-O-methyl modified nucleotide
  modified_base 72: mod_base = OTHER; note = 2'-O-methyl modified nucleotide
  modified_base 73: mod_base = OTHER; note = 2'-O-methyl modified nucleotide
  modified_base 74: mod_base = OTHER; note = 2'-O-methyl modified nucleotide
  modified_base 75: mod_base = OTHER; note = 2'-O-methyl modified nucleotide
  modified_base 76: mod_base = OTHER; note = 2'-O-methyl modified nucleotide
  modified_base 77: mod_base = OTHER; note = 2'-O-methyl modified nucleotide
  modified_base 78: mod_base = OTHER; note = 2'-O-methyl modified nucleotide
  modified_base 79: mod_base = OTHER; note = 2'-O-methyl modified nucleotide
  modified_base 80: mod_base = OTHER; note = 2'-O-methyl modified nucleotide
  modified_base 81: mod_base = OTHER; note = 2'-O-methyl modified nucleotide
  modified_base 82: mod_base = OTHER; note = 2'-O-methyl modified nucleotide
  modified_base 83: mod_base = OTHER; note = 2'-O-methyl modified nucleotide
  modified_base 84: mod_base = OTHER; note = 2'-O-methyl modified nucleotide
  modified_base 85: mod_base = OTHER; note = 2'-O-methyl modified nucleotide
  modified_base 86: mod_base = OTHER; note = 2'-O-methyl modified nucleotide
  modified_base 87: mod_base = OTHER; note = 2'-O-methyl modified nucleotide
  modified_base 88: mod_base = OTHER; note = 2'-O-methyl modified nucleotide
  modified_base 89: mod_base = OTHER; note = 2'-O-methyl modified nucleotide
  modified_base 90: mod_base = OTHER; note = 2'-O-methyl modified nucleotide
  modified_base 91: mod_base = OTHER; note = 2'-O-methyl modified nucleotide
  modified_base 92: mod_base = OTHER; note = 2'-O-methyl modified nucleotide
  modified_base 93: mod_base = OTHER; note = 2'-O-methyl modified nucleotide
  modified_base 94: mod_base = OTHER; note = 2'-O-methyl modified nucleotide
  modified_base 95: mod_base = OTHER; note = 2'-O-methyl modified nucleotide
  modified_base 96: mod_base = OTHER; note = 2'-O-methyl modified nucleotide
  modified_base 97: mod_base = OTHER; note = 2'-O-methyl modified nucleotide with phosphorothioate linkage
  modified_base 98: mod_base = OTHER; note = 2'-O-methyl modified nucleotide with phosphorothioate linkage
  modified_base 99: mod_base = OTHER; note = 2'-O-methyl modified nucleotide with phosphorothioate linkage
  modified_base 100: mod_base = OTHER; note = 2'-O-methyl modified nucleotide
  misc_difference 97..100: note = This region may encompass 0-4 nucleotides

SEQ ID NO: 2317 - RNA, 100 nt, synthetic construct; identical to SEQ ID NO: 1317
  source 1..100: mol_type = other RNA
  modified_base 1: mod_base = OTHER; note = 2'-O-methyl modified nucleotide with phosphorothioate linkage
  modified_base 2: mod_base = OTHER; note = 2'-O-methyl modified nucleotide with phosphorothioate linkage
  modified_base 3: mod_base = OTHER; note = 2'-O-methyl modified nucleotide with phosphorothioate linkage
  modified_base 29: mod_base = OTHER; note = 2'-O-methyl modified nucleotide
  modified_base 30: mod_base = OTHER; note = 2'-O-methyl modified nucleotide
  modified_base 31: mod_base = OTHER; note = 2'-O-methyl modified nucleotide
  modified_base 32: mod_base = OTHER; note = 2'-O-methyl modified nucleotide
  modified_base 33: mod_base = OTHER; note = 2'-O-methyl modified nucleotide
  modified_base 34: mod_base = OTHER; note = 2'-O-methyl modified nucleotide
  modified_base 35: mod_base = OTHER; note = 2'-O-methyl modified nucleotide
  modified_base 36: mod_base = OTHER; note = 2'-O-methyl modified nucleotide
  modified_base 37: mod_base = OTHER; note = 2'-O-methyl modified nucleotide
  modified_base 38: mod_base = OTHER; note = 2'-O-methyl modified nucleotide
  modified_base 39: mod_base = OTHER; note = 2'-O-methyl modified nucleotide
  modified_base 40: mod_base = OTHER; note = 2'-O-methyl modified nucleotide
  modified_base 69: mod_base = OTHER; note = 2'-O-methyl modified nucleotide
  modified_base 70: mod_base = OTHER; note = 2'-O-methyl modified nucleotide
  modified_base 71: mod_base = OTHER; note = 2'-O-methyl modified nucleotide
  modified_base 72: mod_base = OTHER; note = 2'-O-methyl modified nucleotide
  modified_base 73: mod_base = OTHER; note = 2'-O-methyl modified nucleotide
  modified_base 74: mod_base = OTHER; note = 2'-O-methyl modified nucleotide
  modified_base 75: mod_base = OTHER; note = 2'-O-methyl modified nucleotide
  modified_base 76: mod_base = OTHER; note = 2'-O-methyl modified nucleotide
  modified_base 77: mod_base = OTHER; note = 2'-O-methyl modified nucleotide
  modified_base 78: mod_base = OTHER; note = 2'-O-methyl modified nucleotide
  modified_base 79: mod_base = OTHER; note = 2'-O-methyl modified nucleotide
  modified_base 80: mod_base = OTHER; note = 2'-O-methyl modified nucleotide
  modified_base 81: mod_base = OTHER; note = 2'-O-methyl modified nucleotide
  modified_base 82: mod_base = OTHER; note = 2'-O-methyl modified nucleotide
  modified_base 83: mod_base = OTHER; note = 2'-O-methyl modified nucleotide
  modified_base 84: mod_base = OTHER; note = 2'-O-methyl modified nucleotide
  modified_base 85: mod_base = OTHER; note = 2'-O-methyl modified nucleotide
  modified_base 86: mod_base = OTHER; note = 2'-O-methyl modified nucleotide
  modified_base 87: mod_base = OTHER; note = 2'-O-methyl modified nucleotide
  modified_base 88: mod_base = OTHER; note = 2'-O-methyl modified nucleotide
  modified_base 89: mod_base = OTHER; note = 2'-O-methyl modified nucleotide
  modified_base 90: mod_base = OTHER; note = 2'-O-methyl modified nucleotide
  modified_base 91: mod_base = OTHER; note = 2'-O-methyl modified nucleotide
  modified_base 92: mod_base = OTHER; note = 2'-O-methyl modified nucleotide
  modified_base 93: mod_base = OTHER; note = 2'-O-methyl modified nucleotide
  modified_base 94: mod_base = OTHER; note = 2'-O-methyl modified nucleotide
  modified_base 95: mod_base = OTHER; note = 2'-O-methyl modified nucleotide
  modified_base 96: mod_base = OTHER; note = 2'-O-methyl modified nucleotide
  modified_base 97: mod_base = OTHER; note = 2'-O-methyl modified nucleotide with phosphorothioate linkage
  modified_base 98: mod_base = OTHER; note = 2'-O-methyl modified nucleotide with phosphorothioate linkage
  modified_base 99: mod_base = OTHER; note = 2'-O-methyl modified nucleotide with phosphorothioate linkage
  modified_base 100: mod_base = OTHER; note = 2'-O-methyl modified nucleotide
  misc_difference 97..100: note = This region may encompass 0-4 nucleotides

SEQ ID NO: 2318 - RNA, 100 nt, synthetic construct; identical to SEQ ID NO: 1318
  source 1..100: mol_type = other RNA
  modified_base 1: mod_base = OTHER; note = 2'-O-methyl modified nucleotide with phosphorothioate linkage
  modified_base 2: mod_base = OTHER; note = 2'-O-methyl modified nucleotide with phosphorothioate linkage
  modified_base 3: mod_base = OTHER; note = 2'-O-methyl modified nucleotide with phosphorothioate linkage
  modified_base 29: mod_base = OTHER; note = 2'-O-methyl modified nucleotide
  modified_base 30: mod_base = OTHER; note = 2'-O-methyl modified nucleotide
  modified_base 31: mod_base = OTHER; note = 2'-O-methyl modified nucleotide
  modified_base 32: mod_base = OTHER; note = 2'-O-methyl modified nucleotide
  modified_base 33: mod_base = OTHER; note = 2'-O-methyl modified nucleotide
  modified_base 34: mod_base = OTHER; note = 2'-O-methyl modified nucleotide
  modified_base 35: mod_base = OTHER; note = 2'-O-methyl modified nucleotide
  modified_base 36: mod_base = OTHER; note = 2'-O-methyl modified nucleotide
  modified_base 37: mod_base = OTHER; note = 2'-O-methyl modified nucleotide
  modified_base 38: mod_base = OTHER; note = 2'-O-methyl modified nucleotide
  modified_base 39: mod_base = OTHER; note = 2'-O-methyl modified nucleotide
  modified_base 40: mod_base = OTHER; note = 2'-O-methyl modified nucleotide
  modified_base 69: mod_base = OTHER; note = 2'-O-methyl modified nucleotide
  modified_base 70: mod_base = OTHER; note = 2'-O-methyl modified nucleotide
  modified_base 71: mod_base = OTHER; note = 2'-O-methyl modified nucleotide
  modified_base 72: mod_base = OTHER; note = 2'-O-methyl modified nucleotide
  modified_base 73: mod_base = OTHER; note = 2'-O-methyl modified nucleotide
  modified_base 74: mod_base = OTHER; note = 2'-O-methyl modified nucleotide
  modified_base 75: mod_base = OTHER; note = 2'-O-methyl modified nucleotide
  modified_base 76: mod_base = OTHER; note = 2'-O-methyl modified nucleotide
  modified_base 77: mod_base = OTHER; note = 2'-O-methyl modified nucleotide
  modified_base 78: mod_base = OTHER; note = 2'-O-methyl modified nucleotide
  modified_base 79: mod_base = OTHER; note = 2'-O-methyl modified nucleotide
  modified_base 80: mod_base = OTHER; note = 2'-O-methyl modified nucleotide
  modified_base 81: mod_base = OTHER; note = 2'-O-methyl modified nucleotide
  modified_base 82: mod_base = OTHER; note = 2'-O-methyl modified nucleotide
  modified_base 83: mod_base = OTHER; note = 2'-O-methyl modified nucleotide
  modified_base 84: mod_base = OTHER; note = 2'-O-methyl modified nucleotide
  modified_base 85: mod_base = OTHER; note = 2'-O-methyl modified nucleotide
  modified_base 86: mod_base = OTHER; note = 2'-O-methyl modified nucleotide
  modified_base 87: mod_base = OTHER; note = 2'-O-methyl modified nucleotide
  modified_base 88: mod_base = OTHER; note = 2'-O-methyl modified nucleotide
  modified_base 89: mod_base = OTHER; note = 2'-O-methyl modified nucleotide
  modified_base 90: mod_base = OTHER; note = 2'-O-methyl modified nucleotide
  modified_base 91: mod_base = OTHER; note = 2'-O-methyl modified nucleotide
  modified_base 92: mod_base = OTHER; note = 2'-O-methyl modified nucleotide
  modified_base 93: mod_base = OTHER; note = 2'-O-methyl modified nucleotide
  modified_base 94: mod_base = OTHER; note = 2'-O-methyl modified nucleotide
  modified_base 95: mod_base = OTHER; note = 2'-O-methyl modified nucleotide
  modified_base 96: mod_base = OTHER; note = 2'-O-methyl modified nucleotide
  modified_base 97: mod_base = OTHER; note = 2'-O-methyl modified nucleotide with phosphorothioate linkage
  modified_base 98: mod_base = OTHER; note = 2'-O-methyl modified nucleotide with phosphorothioate linkage
  modified_base 99: mod_base = OTHER; note = 2'-O-methyl modified nucleotide with phosphorothioate linkage
  modified_base 100: mod_base = OTHER; note = 2'-O-methyl modified nucleotide
  misc_difference 97..100: note = This region may encompass 0-4 nucleotides

SEQ ID NO: 2319 - RNA, 100 nt, synthetic construct; identical to SEQ ID NO: 1319
  source 1..100: mol_type = other RNA
  modified_base 1: mod_base = OTHER; note = 2'-O-methyl modified nucleotide with phosphorothioate linkage
  modified_base 2: mod_base = OTHER; note = 2'-O-methyl modified nucleotide with phosphorothioate linkage
  modified_base 3: mod_base = OTHER; note = 2'-O-methyl modified nucleotide with phosphorothioate linkage
  modified_base 29: mod_base = OTHER; note = 2'-O-methyl modified nucleotide
  modified_base 30: mod_base = OTHER; note = 2'-O-methyl modified nucleotide
  modified_base 31: mod_base = OTHER; note = 2'-O-methyl modified nucleotide
  modified_base 32: mod_base = OTHER; note = 2'-O-methyl modified nucleotide
  modified_base 33: mod_base = OTHER; note = 2'-O-methyl modified nucleotide
  modified_base 34: mod_base = OTHER; note = 2'-O-methyl modified nucleotide
  modified_base 35: mod_base = OTHER; note = 2'-O-methyl modified nucleotide
  modified_base 36: mod_base = OTHER; note = 2'-O-methyl modified nucleotide
  modified_base 37: mod_base = OTHER; note = 2'-O-methyl modified nucleotide
  modified_base 38: mod_base = OTHER; note = 2'-O-methyl modified nucleotide
  modified_base 39: mod_base = OTHER; note = 2'-O-methyl modified nucleotide
  modified_base 40: mod_base = OTHER; note = 2'-O-methyl modified nucleotide
  modified_base 69: mod_base = OTHER; note = 2'-O-methyl modified nucleotide
  modified_base 70: mod_base = OTHER; note = 2'-O-methyl modified nucleotide
  modified_base 71: mod_base = OTHER; note = 2'-O-methyl modified nucleotide
  modified_base 72: mod_base = OTHER; note = 2'-O-methyl modified nucleotide
  modified_base 73: mod_base = OTHER; note = 2'-O-methyl modified nucleotide
  modified_base 74: mod_base = OTHER; note = 2'-O-methyl modified nucleotide
  modified_base 75: mod_base = OTHER; note = 2'-O-methyl modified nucleotide
  modified_base 76: mod_base = OTHER; note = 2'-O-methyl modified nucleotide
  modified_base 77: mod_base = OTHER; note = 2'-O-methyl modified nucleotide
  modified_base 78: mod_base = OTHER; note = 2'-O-methyl modified nucleotide
  modified_base 79: mod_base = OTHER; note = 2'-O-methyl modified nucleotide
  modified_base 80: mod_base = OTHER; note = 2'-O-methyl modified nucleotide
  modified_base 81: mod_base = OTHER; note = 2'-O-methyl modified nucleotide
  modified_base 82: mod_base = OTHER; note = 2'-O-methyl modified nucleotide
  modified_base 83: mod_base = OTHER; note = 2'-O-methyl modified nucleotide
  modified_base 84: mod_base = OTHER; note = 2'-O-methyl modified nucleotide
  modified_base 85: mod_base = OTHER; note = 2'-O-methyl modified nucleotide
  modified_base 86: mod_base = OTHER; note = 2'-O-methyl modified nucleotide
  modified_base 87: mod_base = OTHER; note = 2'-O-methyl modified nucleotide
  modified_base 88: mod_base = OTHER; note = 2'-O-methyl modified nucleotide
  modified_base 89: mod_base = OTHER; note = 2'-O-methyl modified nucleotide
  modified_base 90: mod_base = OTHER; note = 2'-O-methyl modified nucleotide
  modified_base 91: mod_base = OTHER; note = 2'-O-methyl modified nucleotide
  modified_base 92: mod_base = OTHER; note = 2'-O-methyl modified nucleotide
  modified_base 93: mod_base = OTHER; note = 2'-O-methyl modified nucleotide
  modified_base 94: mod_base = OTHER; note = 2'-O-methyl modified nucleotide
  modified_base 95: mod_base = OTHER; note = 2'-O-methyl modified nucleotide
  modified_base 96: mod_base = OTHER; note = 2'-O-methyl modified nucleotide
  modified_base 97: mod_base = OTHER; note = 2'-O-methyl modified nucleotide with phosphorothioate linkage
  modified_base 98: mod_base = OTHER; note = 2'-O-methyl modified nucleotide with phosphorothioate linkage
  modified_base 99: mod_base = OTHER; note = 2'-O-methyl modified nucleotide with phosphorothioate linkage
  modified_base 100: mod_base = OTHER; note = 2'-O-methyl modified nucleotide
  misc_difference 97..100: note = This region may encompass 0-4 nucleotides

SEQ ID NO: 2320 - RNA, 100 nt, synthetic construct; identical to SEQ ID NO: 1320
  source 1..100: mol_type = other RNA
  modified_base 1: mod_base = OTHER; note = 2'-O-methyl modified nucleotide with phosphorothioate linkage
  modified_base 2: mod_base = OTHER; note = 2'-O-methyl modified nucleotide with phosphorothioate linkage
  modified_base 3: mod_base = OTHER; note = 2'-O-methyl modified nucleotide with phosphorothioate linkage
  modified_base 29: mod_base = OTHER; note = 2'-O-methyl modified nucleotide
  modified_base 30: mod_base = OTHER; note = 2'-O-methyl modified nucleotide
  modified_base 31: mod_base = OTHER; note = 2'-O-methyl modified nucleotide
  modified_base 32: mod_base = OTHER; note = 2'-O-methyl modified nucleotide
  modified_base 33: mod_base = OTHER; note = 2'-O-methyl modified nucleotide
  modified_base 34: mod_base = OTHER; note = 2'-O-methyl modified nucleotide
  modified_base 35: mod_base = OTHER; note = 2'-O-methyl modified nucleotide
  modified_base 36: mod_base = OTHER; note = 2'-O-methyl modified nucleotide
  modified_base 37: mod_base = OTHER; note = 2'-O-methyl modified nucleotide
  modified_base 38: mod_base = OTHER; note = 2'-O-methyl modified nucleotide
  modified_base 39: mod_base = OTHER; note = 2'-O-methyl modified nucleotide
  modified_base 40: mod_base = OTHER; note = 2'-O-methyl modified nucleotide
  modified_base 69: mod_base = OTHER; note = 2'-O-methyl modified nucleotide
  modified_base 70: mod_base = OTHER; note = 2'-O-methyl modified nucleotide
  modified_base 71: mod_base = OTHER; note = 2'-O-methyl modified nucleotide
  modified_base 72: mod_base = OTHER; note = 2'-O-methyl modified nucleotide
  modified_base 73: mod_base = OTHER; note = 2'-O-methyl modified nucleotide
  modified_base 74: mod_base = OTHER; note = 2'-O-methyl modified nucleotide
  modified_base 75: mod_base = OTHER; note = 2'-O-methyl modified nucleotide
  modified_base 76: mod_base = OTHER; note = 2'-O-methyl modified nucleotide
  modified_base 77: mod_base = OTHER; note = 2'-O-methyl modified nucleotide
  modified_base 78: mod_base = OTHER; note = 2'-O-methyl modified nucleotide
  modified_base 79: mod_base = OTHER; note = 2'-O-methyl modified nucleotide
  modified_base 80: mod_base = OTHER; note = 2'-O-methyl modified nucleotide
  modified_base 81: mod_base = OTHER; note = 2'-O-methyl modified nucleotide
  modified_base 82: mod_base = OTHER; note = 2'-O-methyl modified nucleotide
  modified_base 83: mod_base = OTHER; note = 2'-O-methyl modified nucleotide
  modified_base 84: mod_base = OTHER; note = 2'-O-methyl modified nucleotide
  modified_base 85: mod_base = OTHER; note = 2'-O-methyl modified nucleotide
  modified_base 86: mod_base = OTHER; note = 2'-O-methyl modified nucleotide
  modified_base 87: mod_base = OTHER; note = 2'-O-methyl modified nucleotide
  modified_base 88: mod_base = OTHER; note = 2'-O-methyl modified nucleotide
  modified_base 89: mod_base = OTHER; note = 2'-O-methyl modified nucleotide
  modified_base 90: mod_base = OTHER; note = 2'-O-methyl modified nucleotide
  modified_base 91: mod_base = OTHER; note = 2'-O-methyl modified nucleotide
  modified_base 92: mod_base = OTHER; note = 2'-O-methyl modified nucleotide
  modified_base 93: mod_base = OTHER; note = 2'-O-methyl modified nucleotide
  modified_base 94: mod_base = OTHER; note = 2'-O-methyl modified nucleotide
  modified_base 95: mod_base = OTHER; note = 2'-O-methyl modified nucleotide
  modified_base 96: mod_base = OTHER; note = 2'-O-methyl modified nucleotide
  modified_base 97: mod_base = OTHER; note = 2'-O-methyl modified nucleotide with phosphorothioate linkage
  modified_base 98: mod_base = OTHER; note = 2'-O-methyl modified nucleotide with phosphorothioate linkage
  modified_base 99: mod_base = OTHER; note = 2'-O-methyl modified nucleotide with phosphorothioate linkage
  modified_base 100: mod_base = OTHER; note = 2'-O-methyl modified nucleotide
  misc_difference 97..100: note = This region may encompass 0-4 nucleotides

SEQ ID NO: 2321 - RNA, 100 nt, synthetic construct; identical to SEQ ID NO: 1321
  source 1..100: mol_type = other RNA
  modified_base 1: mod_base = OTHER; note = 2'-O-methyl modified nucleotide with phosphorothioate linkage
  modified_base 2: mod_base = OTHER; note = 2'-O-methyl modified nucleotide with phosphorothioate linkage
  modified_base 3: mod_base = OTHER; note = 2'-O-methyl modified nucleotide with phosphorothioate linkage
  modified_base 29: mod_base = OTHER; note = 2'-O-methyl modified nucleotide
  modified_base 30: mod_base = OTHER; note = 2'-O-methyl modified nucleotide
  modified_base 31: mod_base = OTHER; note = 2'-O-methyl modified nucleotide
  modified_base 32: mod_base = OTHER; note = 2'-O-methyl modified nucleotide
  modified_base 33: mod_base = OTHER; note = 2'-O-methyl modified nucleotide
  modified_base 34: mod_base = OTHER; note = 2'-O-methyl modified nucleotide
  modified_base 35: mod_base = OTHER; note = 2'-O-methyl modified nucleotide
  modified_base 36: mod_base = OTHER; note = 2'-O-methyl modified nucleotide
  modified_base 37: mod_base = OTHER; note = 2'-O-methyl modified nucleotide
  modified_base 38: mod_base = OTHER; note = 2'-O-methyl modified nucleotide
  modified_base 39: mod_base = OTHER; note = 2'-O-methyl modified nucleotide
  modified_base 40: mod_base = OTHER; note = 2'-O-methyl modified nucleotide
  modified_base 69: mod_base = OTHER; note = 2'-O-methyl modified nucleotide
  modified_base 70: mod_base = OTHER; note = 2'-O-methyl modified nucleotide
  modified_base 71: mod_base = OTHER; note = 2'-O-methyl modified nucleotide
  modified_base 72: mod_base = OTHER; note = 2'-O-methyl modified nucleotide
  modified_base 73: mod_base = OTHER; note = 2'-O-methyl modified nucleotide
  modified_base 74: mod_base = OTHER; note = 2'-O-methyl modified nucleotide
  modified_base 75: mod_base = OTHER; note = 2'-O-methyl modified nucleotide
  modified_base 76: mod_base = OTHER; note = 2'-O-methyl modified nucleotide
  modified_base 77: mod_base = OTHER; note = 2'-O-methyl modified nucleotide
  modified_base 78: mod_base = OTHER; note = 2'-O-methyl modified nucleotide
  modified_base 79: mod_base = OTHER; note = 2'-O-methyl modified nucleotide
  modified_base 80: mod_base = OTHER; note = 2'-O-methyl modified nucleotide
  modified_base 81: mod_base = OTHER; note = 2'-O-methyl modified nucleotide
  modified_base 82: mod_base = OTHER; note = 2'-O-methyl modified nucleotide
  modified_base 83: mod_base = OTHER; note = 2'-O-methyl modified nucleotide
  modified_base 84: mod_base = OTHER; note = 2'-O-methyl modified nucleotide
  modified_base 85: mod_base = OTHER; note = 2'-O-methyl modified nucleotide
  modified_base 86: mod_base = OTHER; note = 2'-O-methyl modified nucleotide
  modified_base 87: mod_base = OTHER; note = 2'-O-methyl modified nucleotide
  modified_base 88: mod_base = OTHER; note = 2'-O-methyl modified nucleotide
  modified_base 89: mod_base = OTHER; note = 2'-O-methyl modified nucleotide
  modified_base 90: mod_base = OTHER; note = 2'-O-methyl modified nucleotide
  modified_base 91: mod_base = OTHER; note = 2'-O-methyl modified nucleotide
  modified_base 92: mod_base = OTHER; note = 2'-O-methyl modified nucleotide
  modified_base 93: mod_base = OTHER; note = 2'-O-methyl modified nucleotide
  modified_base 94: mod_base = OTHER; note = 2'-O-methyl modified nucleotide
  modified_base 95: mod_base = OTHER; note = 2'-O-methyl modified nucleotide
  modified_base 96: mod_base = OTHER; note = 2'-O-methyl modified nucleotide
  modified_base 97: mod_base = OTHER; note = 2'-O-methyl modified nucleotide with phosphorothioate linkage
  modified_base 98: mod_base = OTHER; note = 2'-O-methyl modified nucleotide with phosphorothioate linkage
  modified_base 99: mod_base = OTHER; note = 2'-O-methyl modified nucleotide with phosphorothioate linkage
  modified_base 100: mod_base = OTHER; note = 2'-O-methyl modified nucleotide
  misc_difference 97..100: note = This region may encompass 0-4 nucleotides

SEQ ID NO: 2322 - RNA, 100 nt, synthetic construct; identical to SEQ ID NO: 1322
  source 1..100: mol_type = other RNA
  modified_base 1: mod_base = OTHER; note = 2'-O-methyl modified nucleotide with phosphorothioate linkage
  modified_base 2: mod_base = OTHER; note = 2'-O-methyl modified nucleotide with phosphorothioate linkage
  modified_base 3: mod_base = OTHER; note = 2'-O-methyl modified nucleotide with phosphorothioate linkage
  modified_base 29: mod_base = OTHER; note = 2'-O-methyl modified nucleotide
  modified_base 30: mod_base = OTHER; note = 2'-O-methyl modified nucleotide
  modified_base 31: mod_base = OTHER; note = 2'-O-methyl modified nucleotide
  modified_base 32: mod_base = OTHER; note = 2'-O-methyl modified nucleotide
  modified_base 33: mod_base = OTHER; note = 2'-O-methyl modified nucleotide
  modified_base 34: mod_base = OTHER; note = 2'-O-methyl modified nucleotide
  modified_base 35: mod_base = OTHER; note = 2'-O-methyl modified nucleotide
  modified_base 36: mod_base = OTHER; note = 2'-O-methyl modified nucleotide
  modified_base 37: mod_base = OTHER; note = 2'-O-methyl modified nucleotide
  modified_base 38: mod_base = OTHER; note = 2'-O-methyl modified nucleotide
  modified_base 39: mod_base = OTHER; note = 2'-O-methyl modified nucleotide
  modified_base 40: mod_base = OTHER; note = 2'-O-methyl modified nucleotide
  modified_base 69: mod_base = OTHER; note = 2'-O-methyl modified nucleotide
  modified_base 70: mod_base = OTHER; note = 2'-O-methyl modified nucleotide
  modified_base 71: mod_base = OTHER; note = 2'-O-methyl modified nucleotide
  modified_base 72: mod_base = OTHER; note = 2'-O-methyl modified nucleotide
  modified_base 73: mod_base = OTHER; note = 2'-O-methyl modified nucleotide
  modified_base 74: mod_base = OTHER; note = 2'-O-methyl modified nucleotide
  modified_base 75: mod_base = OTHER; note = 2'-O-methyl modified nucleotide
  modified_base 76: mod_base = OTHER; note = 2'-O-methyl modified nucleotide
  modified_base 77: mod_base = OTHER; note = 2'-O-methyl modified nucleotide
  modified_base 78: mod_base = OTHER; note = 2'-O-methyl modified nucleotide
  modified_base 79: mod_base = OTHER; note = 2'-O-methyl modified nucleotide
  modified_base 80: mod_base = OTHER; note = 2'-O-methyl modified nucleotide
  modified_base 81: mod_base = OTHER; note = 2'-O-methyl modified nucleotide
  modified_base 82: mod_base = OTHER; note = 2'-O-methyl modified nucleotide
  modified_base 83: mod_base = OTHER; note = 2'-O-methyl modified nucleotide
  modified_base 84: mod_base = OTHER; note = 2'-O-methyl modified nucleotide
  modified_base 85: mod_base = OTHER; note = 2'-O-methyl modified nucleotide
  modified_base 86: mod_base = OTHER; note = 2'-O-methyl modified nucleotide
  modified_base 87: mod_base = OTHER; note = 2'-O-methyl modified nucleotide
  modified_base 88: mod_base = OTHER; note = 2'-O-methyl modified nucleotide
  modified_base 89: mod_base = OTHER; note = 2'-O-methyl modified nucleotide
  modified_base 90: mod_base = OTHER; note = 2'-O-methyl modified nucleotide
  modified_base 91: mod_base = OTHER; note = 2'-O-methyl modified nucleotide
  modified_base 92: mod_base = OTHER; note = 2'-O-methyl modified nucleotide
  modified_base 93: mod_base = OTHER; note = 2'-O-methyl modified nucleotide
  modified_base 94: mod_base = OTHER; note = 2'-O-methyl modified nucleotide
  modified_base 95: mod_base = OTHER; note = 2'-O-methyl modified nucleotide
  modified_base 96: mod_base = OTHER; note = 2'-O-methyl modified nucleotide
  modified_base 97: mod_base = OTHER; note = 2'-O-methyl modified nucleotide with phosphorothioate linkage
  modified_base 98: mod_base = OTHER; note = 2'-O-methyl modified nucleotide with phosphorothioate linkage
  modified_base 99: mod_base = OTHER; note = 2'-O-methyl modified nucleotide with phosphorothioate linkage
  modified_base 100: mod_base = OTHER; note = 2'-O-methyl modified nucleotide
  misc_difference 97..100: note = This region may encompass 0-4 nucleotides

SEQ ID NO: 2323 - RNA, 100 nt, synthetic construct; identical to SEQ ID NO: 1323
  source 1..100: mol_type = other RNA
  modified_base 1: mod_base = OTHER; note = 2'-O-methyl modified nucleotide with phosphorothioate linkage
  modified_base 2: mod_base = OTHER; note = 2'-O-methyl modified nucleotide with phosphorothioate linkage
  modified_base 3: mod_base = OTHER; note = 2'-O-methyl modified nucleotide with phosphorothioate linkage
  modified_base 29: mod_base = OTHER; note = 2'-O-methyl modified nucleotide
  modified_base 30: mod_base = OTHER; note = 2'-O-methyl modified nucleotide
  modified_base 31: mod_base = OTHER; note = 2'-O-methyl modified nucleotide
  modified_base 32: mod_base = OTHER; note = 2'-O-methyl modified nucleotide
  modified_base 33: mod_base = OTHER; note = 2'-O-methyl modified nucleotide
  modified_base 34: mod_base = OTHER; note = 2'-O-methyl modified nucleotide
  modified_base 35: mod_base = OTHER; note = 2'-O-methyl modified nucleotide
  modified_base 36: mod_base = OTHER; note = 2'-O-methyl modified nucleotide
  modified_base 37: mod_base = OTHER; note = 2'-O-methyl modified nucleotide
  modified_base 38: mod_base = OTHER; note = 2'-O-methyl modified nucleotide
  modified_base 39: mod_base = OTHER; note = 2'-O-methyl modified nucleotide
  modified_base 40: mod_base = OTHER; note = 2'-O-methyl modified nucleotide
  modified_base 69: mod_base = OTHER; note = 2'-O-methyl modified nucleotide
  modified_base 70: mod_base = OTHER; note = 2'-O-methyl modified nucleotide
  modified_base 71: mod_base = OTHER; note = 2'-O-methyl modified nucleotide
  modified_base 72: mod_base = OTHER; note = 2'-O-methyl modified nucleotide
  modified_base 73: mod_base = OTHER; note = 2'-O-methyl modified nucleotide
  modified_base 74: mod_base = OTHER; note = 2'-O-methyl modified nucleotide
  modified_base 75: mod_base = OTHER; note = 2'-O-methyl modified nucleotide
  modified_base 76: mod_base = OTHER; note = 2'-O-methyl modified nucleotide
  modified_base 77: mod_base = OTHER; note = 2'-O-methyl modified nucleotide
  modified_base 78: mod_base = OTHER; note = 2'-O-methyl modified nucleotide
  modified_base 79: mod_base = OTHER; note = 2'-O-methyl modified nucleotide
  modified_base 80: mod_base = OTHER; note = 2'-O-methyl modified nucleotide
  modified_base 81: mod_base = OTHER; note = 2'-O-methyl modified nucleotide
  modified_base 82: mod_base = OTHER; note = 2'-O-methyl modified nucleotide
  modified_base 83: mod_base = OTHER; note = 2'-O-methyl modified nucleotide
  modified_base 84: mod_base = OTHER; note = 2'-O-methyl modified nucleotide
  modified_base 85: mod_base = OTHER; note = 2'-O-methyl modified nucleotide
  modified_base 86: mod_base = OTHER; note = 2'-O-methyl modified nucleotide
  modified_base 87: mod_base = OTHER; note = 2'-O-methyl modified nucleotide
  modified_base 88: mod_base = OTHER; note = 2'-O-methyl modified nucleotide
  modified_base 89: mod_base = OTHER; note = 2'-O-methyl modified nucleotide
  modified_base 90: mod_base = OTHER; note = 2'-O-methyl modified nucleotide
  modified_base 91: mod_base = OTHER; note = 2'-O-methyl modified nucleotide
  modified_base 92: mod_base = OTHER; note = 2'-O-methyl modified nucleotide
  modified_base 93: mod_base = OTHER; note = 2'-O-methyl modified nucleotide
  modified_base 94: mod_base = OTHER; note = 2'-O-methyl modified nucleotide
  modified_base 95: mod_base = OTHER; note = 2'-O-methyl modified nucleotide
  modified_base 96: mod_base = OTHER; note = 2'-O-methyl modified nucleotide
  modified_base 97: mod_base = OTHER; note = 2'-O-methyl modified nucleotide with phosphorothioate linkage
  modified_base 98: mod_base = OTHER; note = 2'-O-methyl modified nucleotide with phosphorothioate linkage
  modified_base 99: mod_base = OTHER; note = 2'-O-methyl modified nucleotide with phosphorothioate linkage
  modified_base 100: mod_base = OTHER; note = 2'-O-methyl modified nucleotide
  misc_difference 97..100: note = This region may encompass 0-4 nucleotides

SEQ ID NO: 2324 - RNA, 100 nt, synthetic construct; identical to SEQ ID NO: 1324
  source 1..100: mol_type = other RNA
  modified_base 1: mod_base = OTHER; note = 2'-O-methyl modified nucleotide with phosphorothioate linkage
  modified_base 2: mod_base = OTHER; note = 2'-O-methyl modified nucleotide with phosphorothioate linkage
  modified_base 3: mod_base = OTHER; note = 2'-O-methyl modified nucleotide with phosphorothioate linkage
  modified_base 29: mod_base = OTHER; note = 2'-O-methyl modified nucleotide
  modified_base 30: mod_base = OTHER; note = 2'-O-methyl modified nucleotide
  modified_base 31: mod_base = OTHER; note = 2'-O-methyl modified nucleotide
  modified_base 32: mod_base = OTHER; note = 2'-O-methyl modified nucleotide
  modified_base 33: mod_base = OTHER; note = 2'-O-methyl modified nucleotide
  modified_base 34: mod_base = OTHER; note = 2'-O-methyl modified nucleotide
  modified_base 35: mod_base = OTHER; note = 2'-O-methyl modified nucleotide
  modified_base 36: mod_base = OTHER; note = 2'-O-methyl modified nucleotide
  modified_base 37: mod_base = OTHER; note = 2'-O-methyl modified nucleotide
  modified_base 38: mod_base = OTHER; note = 2'-O-methyl modified nucleotide
  modified_base 39: mod_base = OTHER; note = 2'-O-methyl modified nucleotide
  modified_base 40: mod_base = OTHER; note = 2'-O-methyl modified nucleotide
  modified_base 69: mod_base = OTHER; note = 2'-O-methyl modified nucleotide
  modified_base 70: mod_base = OTHER; note = 2'-O-methyl modified nucleotide
  modified_base 71: mod_base = OTHER; note = 2'-O-methyl modified nucleotide
  modified_base 72: mod_base = OTHER; note = 2'-O-methyl modified nucleotide
  modified_base 73: mod_base = OTHER; note = 2'-O-methyl modified nucleotide
  modified_base 74: mod_base = OTHER; note = 2'-O-methyl modified nucleotide
  modified_base 75: mod_base = OTHER; note = 2'-O-methyl modified nucleotide
  modified_base 76: mod_base = OTHER; note = 2'-O-methyl modified nucleotide
  modified_base 77: mod_base = OTHER; note = 2'-O-methyl modified nucleotide
  modified_base 78: mod_base = OTHER; note = 2'-O-methyl modified nucleotide
  modified_base 79: mod_base = OTHER; note = 2'-O-methyl modified nucleotide
  modified_base 80: mod_base = OTHER; note = 2'-O-methyl modified nucleotide
  modified_base 81: mod_base = OTHER; note = 2'-O-methyl modified nucleotide
  modified_base 82: mod_base = OTHER; note = 2'-O-methyl modified nucleotide
  modified_base 83: mod_base = OTHER; note = 2'-O-methyl modified nucleotide
  modified_base 84: mod_base = OTHER; note = 2'-O-methyl modified nucleotide
  modified_base 85: mod_base = OTHER; note = 2'-O-methyl modified nucleotide
  modified_base 86: mod_base = OTHER; note = 2'-O-methyl modified nucleotide
  modified_base 87: mod_base = OTHER; note = 2'-O-methyl modified nucleotide
  modified_base 88: mod_base = OTHER; note = 2'-O-methyl modified nucleotide
  modified_base 89: mod_base = OTHER; note = 2'-O-methyl modified nucleotide
  modified_base 90: mod_base = OTHER; note = 2'-O-methyl modified nucleotide
  modified_base 91: mod_base = OTHER; note = 2'-O-methyl modified nucleotide
  modified_base 92: mod_base = OTHER; note = 2'-O-methyl modified nucleotide
  modified_base 93: mod_base = OTHER; note = 2'-O-methyl modified nucleotide
  modified_base 94: mod_base = OTHER; note = 2'-O-methyl modified nucleotide
  modified_base 95: mod_base = OTHER; note = 2'-O-methyl modified nucleotide
  modified_base 96: mod_base = OTHER; note = 2'-O-methyl modified nucleotide
  modified_base 97: mod_base = OTHER; note = 2'-O-methyl modified nucleotide with phosphorothioate linkage
  modified_base 98: mod_base = OTHER; note = 2'-O-methyl modified nucleotide with phosphorothioate linkage
  modified_base 99: mod_base = OTHER; note = 2'-O-methyl modified nucleotide with phosphorothioate linkage
  modified_base 100: mod_base = OTHER; note = 2'-O-methyl modified nucleotide
  misc_difference 97..100: note = This region may encompass 0-4 nucleotides

SEQ ID NO: 2325 - RNA, 100 nt, synthetic construct; identical to SEQ ID NO: 1325
  source 1..100: mol_type = other RNA
  modified_base 1: mod_base = OTHER; note = 2'-O-methyl modified nucleotide with phosphorothioate linkage
  modified_base 2: mod_base = OTHER; note = 2'-O-methyl modified nucleotide with phosphorothioate linkage
  modified_base 3: mod_base = OTHER; note = 2'-O-methyl modified nucleotide with phosphorothioate linkage
  modified_base 29: mod_base = OTHER; note = 2'-O-methyl modified nucleotide
  modified_base 30: mod_base = OTHER; note = 2'-O-methyl modified nucleotide
  modified_base 31: mod_base = OTHER; note = 2'-O-methyl modified nucleotide
  modified_base 32: mod_base = OTHER; note = 2'-O-methyl modified nucleotide
  modified_base 33: mod_base = OTHER; note = 2'-O-methyl modified nucleotide
  modified_base 34: mod_base = OTHER; note = 2'-O-methyl modified nucleotide
  modified_base 35: mod_base = OTHER; note = 2'-O-methyl modified nucleotide
  modified_base 36: mod_base = OTHER; note = 2'-O-methyl modified nucleotide
  modified_base 37: mod_base = OTHER; note = 2'-O-methyl modified nucleotide
  modified_base 38: mod_base = OTHER; note = 2'-O-methyl modified nucleotide
  modified_base 39: mod_base = OTHER; note = 2'-O-methyl modified nucleotide
  modified_base 40: mod_base = OTHER; note = 2'-O-methyl modified nucleotide
  modified_base 69: mod_base = OTHER; note = 2'-O-methyl modified nucleotide
  modified_base 70: mod_base = OTHER; note = 2'-O-methyl modified nucleotide
  modified_base 71: mod_base = OTHER; note = 2'-O-methyl modified nucleotide
  modified_base 72: mod_base = OTHER; note = 2'-O-methyl modified nucleotide
  modified_base 73: mod_base = OTHER; note = 2'-O-methyl modified nucleotide
  modified_base 74: mod_base = OTHER; note = 2'-O-methyl modified nucleotide
  modified_base 75: mod_base = OTHER; note = 2'-O-methyl modified nucleotide
  modified_base 76: mod_base = OTHER; note = 2'-O-methyl modified nucleotide
  modified_base 77: mod_base = OTHER; note = 2'-O-methyl modified nucleotide
  modified_base 78: mod_base = OTHER; note = 2'-O-methyl modified nucleotide
  modified_base 79: mod_base = OTHER; note = 2'-O-methyl modified nucleotide
  modified_base 80: mod_base = OTHER; note = 2'-O-methyl modified nucleotide
  modified_base 81: mod_base = OTHER; note = 2'-O-methyl modified nucleotide
  modified_base 82: mod_base = OTHER; note = 2'-O-methyl modified nucleotide
  modified_base 83: mod_base = OTHER; note = 2'-O-methyl modified nucleotide
  modified_base 84: mod_base = OTHER; note = 2'-O-methyl modified nucleotide
  modified_base 85: mod_base = OTHER; note = 2'-O-methyl modified nucleotide
  modified_base 86: mod_base = OTHER; note = 2'-O-methyl modified nucleotide
  modified_base 87: mod_base = OTHER; note = 2'-O-methyl modified nucleotide
  modified_base 88: mod_base = OTHER; note = 2'-O-methyl modified nucleotide
  modified_base 89: mod_base = OTHER; note = 2'-O-methyl modified nucleotide
  modified_base 90: mod_base = OTHER; note = 2'-O-methyl modified nucleotide
  modified_base 91: mod_base = OTHER; note = 2'-O-methyl modified nucleotide
  modified_base 92: mod_base = OTHER; note = 2'-O-methyl modified nucleotide
  modified_base 93: mod_base = OTHER; note = 2'-O-methyl modified nucleotide
  modified_base 94: mod_base = OTHER; note = 2'-O-methyl modified nucleotide
  modified_base 95: mod_base = OTHER; note = 2'-O-methyl modified nucleotide
  modified_base 96: mod_base = OTHER; note = 2'-O-methyl modified nucleotide
  modified_base 97: mod_base = OTHER; note = 2'-O-methyl modified nucleotide with phosphorothioate linkage
  modified_base 98: mod_base = OTHER; note = 2'-O-methyl modified nucleotide with phosphorothioate linkage
  modified_base 99: mod_base = OTHER; note = 2'-O-methyl modified nucleotide with phosphorothioate linkage
  modified_base 100: mod_base = OTHER; note = 2'-O-methyl modified nucleotide
  misc_difference 97..100: note = This region may encompass 0-4 nucleotides

SEQ ID NO: 2326 - RNA, 100 nt, synthetic construct; identical to SEQ ID NO: 1326
  source 1..100: mol_type = other RNA
  modified_base 1: mod_base = OTHER; note = 2'-O-methyl modified nucleotide with phosphorothioate linkage
  modified_base 2: mod_base = OTHER; note = 2'-O-methyl modified nucleotide with phosphorothioate linkage
  modified_base 3: mod_base = OTHER; note = 2'-O-methyl modified nucleotide with phosphorothioate linkage
  modified_base 29: mod_base = OTHER; note = 2'-O-methyl modified nucleotide
  modified_base 30: mod_base = OTHER; note = 2'-O-methyl modified nucleotide
  modified_base 31: mod_base = OTHER; note = 2'-O-methyl modified nucleotide
  modified_base 32: mod_base = OTHER; note = 2'-O-methyl modified nucleotide
  modified_base 33: mod_base = OTHER; note = 2'-O-methyl modified nucleotide
  modified_base 34: mod_base = OTHER; note = 2'-O-methyl modified nucleotide
  modified_base 35: mod_base = OTHER; note = 2'-O-methyl modified nucleotide
  modified_base 36: mod_base = OTHER; note = 2'-O-methyl modified nucleotide
  modified_base 37: mod_base = OTHER; note = 2'-O-methyl modified nucleotide
  modified_base 38: mod_base = OTHER; note = 2'-O-methyl modified nucleotide
  modified_base 39: mod_base = OTHER; note = 2'-O-methyl modified nucleotide
  modified_base 40: mod_base = OTHER; note = 2'-O-methyl modified nucleotide
  modified_base 69: mod_base = OTHER; note = 2'-O-methyl modified nucleotide
  modified_base 70: mod_base = OTHER; note = 2'-O-methyl modified nucleotide
  modified_base 71: mod_base = OTHER; note = 2'-O-methyl modified nucleotide
  modified_base 72: mod_base = OTHER; note = 2'-O-methyl modified nucleotide
  modified_base 73: mod_base = OTHER; note = 2'-O-methyl modified nucleotide
  modified_base 74: mod_base = OTHER; note = 2'-O-methyl modified nucleotide
  modified_base 75: mod_base = OTHER; note = 2'-O-methyl modified nucleotide
  modified_base 76: mod_base = OTHER; note = 2'-O-methyl modified nucleotide
  modified_base 77: mod_base = OTHER; note = 2'-O-methyl modified nucleotide
  modified_base 78: mod_base = OTHER; note = 2'-O-methyl modified nucleotide
  modified_base 79: mod_base = OTHER; note = 2'-O-methyl modified nucleotide
  modified_base 80: mod_base = OTHER; note = 2'-O-methyl modified nucleotide
  modified_base 81: mod_base = OTHER; note = 2'-O-methyl modified nucleotide
  modified_base 82: mod_base = OTHER; note = 2'-O-methyl modified nucleotide
  modified_base 83: mod_base = OTHER; note = 2'-O-methyl modified nucleotide
  modified_base 84: mod_base = OTHER; note = 2'-O-methyl modified nucleotide
  modified_base 85: mod_base = OTHER; note = 2'-O-methyl modified nucleotide
  modified_base 86: mod_base = OTHER; note = 2'-O-methyl modified nucleotide
  modified_base 87: mod_base = OTHER; note = 2'-O-methyl modified nucleotide
  modified_base 88: mod_base = OTHER; note = 2'-O-methyl modified nucleotide
  modified_base 89: mod_base = OTHER; note = 2'-O-methyl modified nucleotide
  modified_base 90: mod_base = OTHER; note = 2'-O-methyl modified nucleotide
  modified_base 91: mod_base = OTHER; note = 2'-O-methyl modified nucleotide
  modified_base 92: mod_base = OTHER; note = 2'-O-methyl modified nucleotide
  modified_base 93: mod_base = OTHER; note = 2'-O-methyl modified nucleotide
  modified_base 94: mod_base = OTHER; note = 2'-O-methyl modified nucleotide
  modified_base 95: mod_base = OTHER; note = 2'-O-methyl modified nucleotide
  modified_base 96: mod_base = OTHER; note = 2'-O-methyl modified nucleotide
  modified_base 97: mod_base = OTHER; note = 2'-O-methyl modified nucleotide with phosphorothioate linkage
  modified_base 98: mod_base = OTHER; note = 2'-O-methyl modified nucleotide with phosphorothioate linkage
  modified_base 99: mod_base = OTHER; note = 2'-O-methyl modified nucleotide with phosphorothioate linkage
  modified_base 100: mod_base = OTHER; note = 2'-O-methyl modified nucleotide
  misc_difference 97..100: note = This region may encompass 0-4 nucleotides

SEQ ID NO: 2327 - RNA, 100 nt, synthetic construct; identical to SEQ ID NO: 1327
  source 1..100: mol_type = other RNA
  modified_base 1: mod_base = OTHER; note = 2'-O-methyl modified nucleotide with phosphorothioate linkage
  modified_base 2: mod_base = OTHER; note = 2'-O-methyl modified nucleotide with phosphorothioate linkage
  modified_base 3: mod_base = OTHER; note = 2'-O-methyl modified nucleotide with phosphorothioate linkage
  modified_base 29: mod_base = OTHER; note = 2'-O-methyl modified nucleotide
  modified_base 30: mod_base = OTHER; note = 2'-O-methyl modified nucleotide
  modified_base 31: mod_base = OTHER; note = 2'-O-methyl modified nucleotide
  modified_base 32: mod_base = OTHER; note = 2'-O-methyl modified nucleotide
  modified_base 33: mod_base = OTHER; note = 2'-O-methyl modified nucleotide
  modified_base 34: mod_base = OTHER; note = 2'-O-methyl modified nucleotide
  modified_base 35: mod_base = OTHER; note = 2'-O-methyl modified nucleotide
  modified_base 36: mod_base = OTHER; note = 2'-O-methyl modified nucleotide
  modified_base 37: mod_base = OTHER; note = 2'-O-methyl modified nucleotide
  modified_base 38: mod_base = OTHER; note = 2'-O-methyl modified nucleotide
  modified_base 39: mod_base = OTHER; note = 2'-O-methyl modified nucleotide
  modified_base 40: mod_base = OTHER; note = 2'-O-methyl modified nucleotide
  modified_base 69: mod_base = OTHER; note = 2'-O-methyl modified nucleotide
  modified_base 70: mod_base = OTHER; note = 2'-O-methyl modified nucleotide
  modified_base 71: mod_base = OTHER; note = 2'-O-methyl modified nucleotide
  modified_base 72: mod_base = OTHER; note = 2'-O-methyl modified nucleotide
  modified_base 73: mod_base = OTHER; note = 2'-O-methyl modified nucleotide
  modified_base 74: mod_base = OTHER; note = 2'-O-methyl modified nucleotide
  modified_base 75: mod_base = OTHER; note = 2'-O-methyl modified nucleotide
  modified_base 76: mod_base = OTHER; note = 2'-O-methyl modified nucleotide
  modified_base 77: mod_base = OTHER; note = 2'-O-methyl modified nucleotide
  modified_base 78: mod_base = OTHER; note = 2'-O-methyl modified nucleotide
  modified_base 79: mod_base = OTHER; note = 2'-O-methyl modified nucleotide
  modified_base 80: mod_base = OTHER; note = 2'-O-methyl modified nucleotide
  modified_base 81: mod_base = OTHER; note = 2'-O-methyl modified nucleotide
  modified_base 82: mod_base = OTHER; note = 2'-O-methyl modified nucleotide
  modified_base 83: mod_base = OTHER; note = 2'-O-methyl modified nucleotide
  modified_base 84: mod_base = OTHER; note = 2'-O-methyl modified nucleotide
  modified_base 85: mod_base = OTHER; note = 2'-O-methyl modified nucleotide
  modified_base 86: mod_base = OTHER; note = 2'-O-methyl modified nucleotide
  modified_base 87: mod_base = OTHER; note = 2'-O-methyl modified nucleotide
  modified_base 88: mod_base = OTHER; note = 2'-O-methyl modified nucleotide
  modified_base 89: mod_base = OTHER; note = 2'-O-methyl modified nucleotide
  modified_base 90: mod_base = OTHER; note = 2'-O-methyl modified nucleotide
  modified_base 91: mod_base = OTHER; note = 2'-O-methyl modified nucleotide
  modified_base 92: mod_base = OTHER; note = 2'-O-methyl modified nucleotide
  modified_base 93: mod_base = OTHER; note = 2'-O-methyl modified nucleotide
  modified_base 94: mod_base = OTHER; note = 2'-O-methyl modified nucleotide
  modified_base 95: mod_base = OTHER; note = 2'-O-methyl modified nucleotide
  modified_base 96: mod_base = OTHER; note = 2'-O-methyl modified nucleotide
  modified_base 97: mod_base = OTHER; note = 2'-O-methyl modified nucleotide with phosphorothioate linkage
  modified_base 98: mod_base = OTHER; note = 2'-O-methyl modified nucleotide with phosphorothioate linkage
  modified_base 99: mod_base = OTHER; note = 2'-O-methyl modified nucleotide with phosphorothioate linkage
  modified_base 100: mod_base = OTHER; note = 2'-O-methyl modified nucleotide
  misc_difference 97..100: note = This region may encompass 0-4 nucleotides

SEQ ID NO: 2328 - RNA, 100 nt, synthetic construct; identical to SEQ ID NO: 1328
  source 1..100: mol_type = other RNA
  modified_base 1: mod_base = OTHER; note = 2'-O-methyl modified nucleotide with phosphorothioate linkage
  modified_base 2: mod_base = OTHER; note = 2'-O-methyl modified nucleotide with phosphorothioate linkage
  modified_base 3: mod_base = OTHER; note = 2'-O-methyl modified nucleotide with phosphorothioate linkage
  modified_base 29: mod_base = OTHER; note = 2'-O-methyl modified nucleotide
  modified_base 30: mod_base = OTHER; note = 2'-O-methyl modified nucleotide
  modified_base 31: mod_base = OTHER; note = 2'-O-methyl modified nucleotide
  modified_base 32: mod_base = OTHER; note = 2'-O-methyl modified nucleotide
  modified_base 33: mod_base = OTHER; note = 2'-O-methyl modified nucleotide
  modified_base 34: mod_base = OTHER; note = 2'-O-methyl modified nucleotide
  modified_base 35: mod_base = OTHER; note = 2'-O-methyl modified nucleotide
  modified_base 36: mod_base = OTHER; note = 2'-O-methyl modified nucleotide
  modified_base 37: mod_base = OTHER; note = 2'-O-methyl modified nucleotide
  modified_base 38: mod_base = OTHER; note = 2'-O-methyl modified nucleotide
  modified_base 39: mod_base = OTHER; note = 2'-O-methyl modified nucleotide
  modified_base 40: mod_base = OTHER; note = 2'-O-methyl modified nucleotide
  modified_base 69: mod_base = OTHER; note = 2'-O-methyl modified nucleotide
  modified_base 70: mod_base = OTHER; note = 2'-O-methyl modified nucleotide
  modified_base 71: mod_base = OTHER; note = 2'-O-methyl modified nucleotide
  modified_base 72: mod_base = OTHER; note = 2'-O-methyl modified nucleotide
  modified_base 73: mod_base = OTHER; note = 2'-O-methyl modified nucleotide
  modified_base 74: mod_base = OTHER; note = 2'-O-methyl modified nucleotide
  modified_base 75: mod_base = OTHER; note = 2'-O-methyl modified nucleotide
  modified_base 76: mod_base = OTHER; note = 2'-O-methyl modified nucleotide
  modified_base 77: mod_base = OTHER; note = 2'-O-methyl modified nucleotide
  modified_base 78: mod_base = OTHER; note = 2'-O-methyl modified nucleotide
  modified_base 79: mod_base = OTHER; note = 2'-O-methyl modified nucleotide
  modified_base 80: mod_base = OTHER; note = 2'-O-methyl modified nucleotide
  modified_base 81: mod_base = OTHER; note = 2'-O-methyl modified nucleotide
  modified_base 82: mod_base = OTHER; note = 2'-O-methyl modified nucleotide
  modified_base 83: mod_base = OTHER; note = 2'-O-methyl modified nucleotide
  modified_base 84: mod_base = OTHER; note = 2'-O-methyl modified nucleotide
  modified_base 85: mod_base = OTHER; note = 2'-O-methyl modified nucleotide
  modified_base 86: mod_base = OTHER; note = 2'-O-methyl modified nucleotide
  modified_base 87: mod_base = OTHER; note = 2'-O-methyl modified nucleotide
  modified_base 88: mod_base = OTHER; note = 2'-O-methyl modified nucleotide
  modified_base 89: mod_base = OTHER; note = 2'-O-methyl modified nucleotide
  modified_base 90: mod_base = OTHER; note = 2'-O-methyl modified nucleotide
  modified_base 91: mod_base = OTHER; note = 2'-O-methyl modified nucleotide
  modified_base 92: mod_base = OTHER; note = 2'-O-methyl modified nucleotide
  modified_base 93: mod_base = OTHER; note = 2'-O-methyl modified nucleotide
  modified_base 94: mod_base = OTHER; note = 2'-O-methyl modified nucleotide
  modified_base 95: mod_base = OTHER; note = 2'-O-methyl modified nucleotide
  modified_base 96: mod_base = OTHER; note = 2'-O-methyl modified nucleotide
  modified_base 97: mod_base = OTHER; note = 2'-O-methyl modified nucleotide with phosphorothioate linkage
  modified_base 98: mod_base = OTHER; note = 2'-O-methyl modified nucleotide with phosphorothioate linkage
  modified_base 99: mod_base = OTHER; note = 2'-O-methyl modified nucleotide with phosphorothioate linkage
  modified_base 100: mod_base = OTHER; note = 2'-O-methyl modified nucleotide
  misc_difference 97..100: note = This region may encompass 0-4 nucleotides

SEQ ID NO: 2329 - RNA, 100 nt, synthetic construct; identical to SEQ ID NO: 1329
  source 1..100: mol_type = other RNA
  modified_base 1: mod_base = OTHER; note = 2'-O-methyl modified nucleotide with phosphorothioate linkage
  modified_base 2: mod_base = OTHER; note = 2'-O-methyl modified nucleotide with phosphorothioate linkage
  modified_base 3: mod_base = OTHER; note = 2'-O-methyl modified nucleotide with phosphorothioate linkage
  modified_base 29: mod_base = OTHER; note = 2'-O-methyl modified nucleotide
  modified_base 30: mod_base = OTHER; note = 2'-O-methyl modified nucleotide
  modified_base 31: mod_base = OTHER; note = 2'-O-methyl modified nucleotide
  modified_base 32: mod_base = OTHER; note = 2'-O-methyl modified nucleotide
  modified_base 33: mod_base = OTHER; note = 2'-O-methyl modified nucleotide
  modified_base 34: mod_base = OTHER; note = 2'-O-methyl modified nucleotide
  modified_base 35: mod_base = OTHER; note = 2'-O-methyl modified nucleotide
  modified_base 36: mod_base = OTHER; note = 2'-O-methyl modified nucleotide
  modified_base 37: mod_base = OTHER; note = 2'-O-methyl modified nucleotide
  modified_base 38: mod_base = OTHER; note = 2'-O-methyl modified nucleotide
  modified_base 39: mod_base = OTHER; note = 2'-O-methyl modified nucleotide
  modified_base 40: mod_base = OTHER; note = 2'-O-methyl modified nucleotide
  modified_base 69: mod_base = OTHER; note = 2'-O-methyl modified nucleotide
  modified_base 70: mod_base = OTHER; note = 2'-O-methyl modified nucleotide
  modified_base 71: mod_base = OTHER; note = 2'-O-methyl modified nucleotide
  modified_base 72: mod_base = OTHER; note = 2'-O-methyl modified nucleotide
  modified_base 73: mod_base = OTHER; note = 2'-O-methyl modified nucleotide
  modified_base 74: mod_base = OTHER; note = 2'-O-methyl modified nucleotide
  modified_base 75: mod_base = OTHER; note = 2'-O-methyl modified nucleotide
  modified_base 76: mod_base = OTHER; note = 2'-O-methyl modified nucleotide
  modified_base 77: mod_base = OTHER; note = 2'-O-methyl modified nucleotide
  modified_base 78: mod_base = OTHER; note = 2'-O-methyl modified nucleotide
  modified_base 79: mod_base = OTHER; note = 2'-O-methyl modified nucleotide
  modified_base 80: mod_base = OTHER; note = 2'-O-methyl modified nucleotide
  modified_base 81: mod_base = OTHER; note = 2'-O-methyl modified nucleotide
  modified_base 82: mod_base = OTHER; note = 2'-O-methyl modified nucleotide
  modified_base 83: mod_base = OTHER; note = 2'-O-methyl modified nucleotide
  modified_base 84: mod_base = OTHER; note = 2'-O-methyl modified nucleotide
  modified_base 85: mod_base = OTHER; note = 2'-O-methyl modified nucleotide
  modified_base 86: mod_base = OTHER; note = 2'-O-methyl modified nucleotide
  modified_base 87: mod_base = OTHER; note = 2'-O-methyl modified nucleotide
  modified_base 88: mod_base = OTHER; note = 2'-O-methyl modified nucleotide
  modified_base 89: mod_base = OTHER; note = 2'-O-methyl modified nucleotide
  modified_base 90: mod_base = OTHER; note = 2'-O-methyl modified nucleotide
  modified_base 91: mod_base = OTHER; note = 2'-O-methyl modified nucleotide
  modified_base 92: mod_base = OTHER; note = 2'-O-methyl modified nucleotide
  modified_base 93: mod_base = OTHER; note = 2'-O-methyl modified nucleotide
  modified_base 94: mod_base = OTHER; note = 2'-O-methyl modified nucleotide
  modified_base 95: mod_base = OTHER; note = 2'-O-methyl modified nucleotide
  modified_base 96: mod_base = OTHER; note = 2'-O-methyl modified nucleotide
  modified_base 97: mod_base = OTHER; note = 2'-O-methyl modified nucleotide with phosphorothioate linkage
  modified_base 98: mod_base = OTHER; note = 2'-O-methyl modified nucleotide with phosphorothioate linkage
  modified_base 99: mod_base = OTHER; note = 2'-O-methyl modified nucleotide with phosphorothioate linkage
  modified_base 100: mod_base = OTHER; note = 2'-O-methyl modified nucleotide
  misc_difference 97..100: note = This region may encompass 0-4 nucleotides

SEQ ID NO: 2330 - RNA, 100 nt, synthetic construct; identical to SEQ ID NO: 1330
  source 1..100: mol_type = other RNA
  modified_base 1: mod_base = OTHER; note = 2'-O-methyl modified nucleotide with phosphorothioate linkage
  modified_base 2: mod_base = OTHER; note = 2'-O-methyl modified nucleotide with phosphorothioate linkage
  modified_base 3: mod_base = OTHER; note = 2'-O-methyl modified nucleotide with phosphorothioate linkage
  modified_base 29: mod_base = OTHER; note = 2'-O-methyl modified nucleotide
  modified_base 30: mod_base = OTHER; note = 2'-O-methyl modified nucleotide
  modified_base 31: mod_base = OTHER; note = 2'-O-methyl modified nucleotide
  modified_base 32: mod_base = OTHER; note = 2'-O-methyl modified nucleotide
  modified_base 33: mod_base = OTHER; note = 2'-O-methyl modified nucleotide
  modified_base 34: mod_base = OTHER; note = 2'-O-methyl modified nucleotide
  modified_base 35: mod_base = OTHER; note = 2'-O-methyl modified nucleotide
  modified_base 36: mod_base = OTHER; note = 2'-O-methyl modified nucleotide
  modified_base 37: mod_base = OTHER; note = 2'-O-methyl modified nucleotide
  modified_base 38: mod_base = OTHER; note = 2'-O-methyl modified nucleotide
  modified_base 39: mod_base = OTHER; note = 2'-O-methyl modified nucleotide
  modified_base 40: mod_base = OTHER; note = 2'-O-methyl modified nucleotide
  modified_base 69: mod_base = OTHER; note = 2'-O-methyl modified nucleotide
  modified_base 70: mod_base = OTHER; note = 2'-O-methyl modified nucleotide
  modified_base 71: mod_base = OTHER; note = 2'-O-methyl modified nucleotide
  modified_base 72: mod_base = OTHER; note = 2'-O-methyl modified nucleotide
  modified_base 73: mod_base = OTHER; note = 2'-O-methyl modified nucleotide
  modified_base 74: mod_base = OTHER; note = 2'-O-methyl modified nucleotide
  modified_base 75: mod_base = OTHER; note = 2'-O-methyl modified nucleotide
  modified_base 76: mod_base = OTHER; note = 2'-O-methyl modified nucleotide
  modified_base 77: mod_base = OTHER; note = 2'-O-methyl modified nucleotide
  modified_base 78: mod_base = OTHER; note = 2'-O-methyl modified nucleotide
  modified_base 79: mod_base = OTHER; note = 2'-O-methyl modified nucleotide
  modified_base 80: mod_base = OTHER; note = 2'-O-methyl modified nucleotide
  modified_base 81: mod_base = OTHER; note = 2'-O-methyl modified nucleotide
  modified_base 82: mod_base = OTHER; note = 2'-O-methyl modified nucleotide
  modified_base 83: mod_base = OTHER; note = 2'-O-methyl modified nucleotide
  modified_base 84: mod_base = OTHER; note = 2'-O-methyl modified nucleotide
  modified_base 85: mod_base = OTHER; note = 2'-O-methyl modified nucleotide
  modified_base 86: mod_base = OTHER; note = 2'-O-methyl modified nucleotide
  modified_base 87: mod_base = OTHER; note = 2'-O-methyl modified nucleotide
  modified_base 88: mod_base = OTHER; note = 2'-O-methyl modified nucleotide
  modified_base 89: mod_base = OTHER; note = 2'-O-methyl modified nucleotide
  modified_base 90: mod_base = OTHER; note = 2'-O-methyl modified nucleotide
  modified_base 91: mod_base = OTHER; note = 2'-O-methyl modified nucleotide
  modified_base 92: mod_base = OTHER; note = 2'-O-methyl modified nucleotide
  modified_base 93: mod_base = OTHER; note = 2'-O-methyl modified nucleotide
  modified_base 94: mod_base = OTHER; note = 2'-O-methyl modified nucleotide
  modified_base 95: mod_base = OTHER; note = 2'-O-methyl modified nucleotide
  modified_base 96: mod_base = OTHER; note = 2'-O-methyl modified nucleotide
  modified_base 97: mod_base = OTHER; note = 2'-O-methyl modified nucleotide with phosphorothioate linkage
  modified_base 98: mod_base = OTHER; note = 2'-O-methyl modified nucleotide with phosphorothioate linkage
  modified_base 99: mod_base = OTHER; note = 2'-O-methyl modified nucleotide with phosphorothioate linkage
  modified_base 100: mod_base = OTHER; note = 2'-O-methyl modified nucleotide
  misc_difference 97..100: note = This region may encompass 0-4 nucleotides

SEQ ID NO: 2331 - RNA, 100 nt, synthetic construct; identical to SEQ ID NO: 1331
  source 1..100: mol_type = other RNA
  modified_base 1: mod_base = OTHER; note = 2'-O-methyl modified nucleotide with phosphorothioate linkage
  modified_base 2: mod_base = OTHER; note = 2'-O-methyl modified nucleotide with phosphorothioate linkage
  modified_base 3: mod_base = OTHER; note = 2'-O-methyl modified nucleotide with phosphorothioate linkage
  modified_base 29: mod_base = OTHER; note = 2'-O-methyl modified nucleotide
  modified_base 30: mod_base = OTHER; note = 2'-O-methyl modified nucleotide
  modified_base 31: mod_base = OTHER; note = 2'-O-methyl modified nucleotide
  modified_base 32: mod_base = OTHER; note = 2'-O-methyl modified nucleotide
  modified_base 33: mod_base = OTHER; note = 2'-O-methyl modified nucleotide
  modified_base 34: mod_base = OTHER; note = 2'-O-methyl modified nucleotide
  modified_base 35: mod_base = OTHER; note = 2'-O-methyl modified nucleotide
  modified_base 36: mod_base = OTHER; note = 2'-O-methyl modified nucleotide
  modified_base 37: mod_base = OTHER; note = 2'-O-methyl modified nucleotide
  modified_base 38: mod_base = OTHER; note = 2'-O-methyl modified nucleotide
  modified_base 39: mod_base = OTHER; note = 2'-O-methyl modified nucleotide
  modified_base 40: mod_base = OTHER; note = 2'-O-methyl modified nucleotide
  modified_base 69: mod_base = OTHER; note = 2'-O-methyl modified nucleotide
  modified_base 70: mod_base = OTHER; note = 2'-O-methyl modified nucleotide
  modified_base 71: mod_base = OTHER; note = 2'-O-methyl modified nucleotide
  modified_base 72: mod_base = OTHER; note = 2'-O-methyl modified nucleotide
  modified_base 73: mod_base = OTHER; note = 2'-O-methyl modified nucleotide
  modified_base 74: mod_base = OTHER; note = 2'-O-methyl modified nucleotide
  modified_base 75: mod_base = OTHER; note = 2'-O-methyl modified nucleotide
  modified_base 76: mod_base = OTHER; note = 2'-O-methyl modified nucleotide
  modified_base 77: mod_base = OTHER; note = 2'-O-methyl modified nucleotide
  modified_base 78: mod_base = OTHER; note = 2'-O-methyl modified nucleotide
  modified_base 79: mod_base = OTHER; note = 2'-O-methyl modified nucleotide
  modified_base 80: mod_base = OTHER; note = 2'-O-methyl modified nucleotide
  modified_base 81: mod_base = OTHER; note = 2'-O-methyl modified nucleotide
  modified_base 82: mod_base = OTHER; note = 2'-O-methyl modified nucleotide
  modified_base 83: mod_base = OTHER; note = 2'-O-methyl modified nucleotide
  modified_base 84: mod_base = OTHER; note = 2'-O-methyl modified nucleotide
  modified_base 85: mod_base = OTHER; note = 2'-O-methyl modified nucleotide
  modified_base 86: mod_base = OTHER; note = 2'-O-methyl modified nucleotide
  modified_base 87: mod_base = OTHER; note = 2'-O-methyl modified nucleotide
  modified_base 88: mod_base = OTHER; note = 2'-O-methyl modified nucleotide
  modified_base 89: mod_base = OTHER; note = 2'-O-methyl modified nucleotide
  modified_base 90: mod_base = OTHER; note = 2'-O-methyl modified nucleotide
  modified_base 91: mod_base = OTHER; note = 2'-O-methyl modified nucleotide
  modified_base 92: mod_base = OTHER; note = 2'-O-methyl modified nucleotide
  modified_base 93: mod_base = OTHER; note = 2'-O-methyl modified nucleotide
  modified_base 94: mod_base = OTHER; note = 2'-O-methyl modified nucleotide
  modified_base 95: mod_base = OTHER; note = 2'-O-methyl modified nucleotide
  modified_base 96: mod_base = OTHER; note = 2'-O-methyl modified nucleotide
  modified_base 97: mod_base = OTHER; note = 2'-O-methyl modified nucleotide with phosphorothioate linkage
  modified_base 98: mod_base = OTHER; note = 2'-O-methyl modified nucleotide with phosphorothioate linkage
  modified_base 99: mod_base = OTHER; note = 2'-O-methyl modified nucleotide with phosphorothioate linkage
  modified_base 100: mod_base = OTHER; note = 2'-O-methyl modified nucleotide
  misc_difference 97..100: note = This region may encompass 0-4 nucleotides

SEQ ID NO: 2332 - RNA, 100 nt, synthetic construct; identical to SEQ ID NO: 1332
  source 1..100: mol_type = other RNA
  modified_base 1: mod_base = OTHER; note = 2'-O-methyl modified nucleotide with phosphorothioate linkage
  modified_base 2: mod_base = OTHER; note = 2'-O-methyl modified nucleotide with phosphorothioate linkage
  modified_base 3: mod_base = OTHER; note = 2'-O-methyl modified nucleotide with phosphorothioate linkage
  modified_base 29: mod_base = OTHER; note = 2'-O-methyl modified nucleotide
  modified_base 30: mod_base = OTHER; note = 2'-O-methyl modified nucleotide
  modified_base 31: mod_base = OTHER; note = 2'-O-methyl modified nucleotide
  modified_base 32: mod_base = OTHER; note = 2'-O-methyl modified nucleotide
  modified_base 33: mod_base = OTHER; note = 2'-O-methyl modified nucleotide
  modified_base 34: mod_base = OTHER; note = 2'-O-methyl modified nucleotide
  modified_base 35: mod_base = OTHER; note = 2'-O-methyl modified nucleotide
  modified_base 36: mod_base = OTHER; note = 2'-O-methyl modified nucleotide
  modified_base 37: mod_base = OTHER; note = 2'-O-methyl modified nucleotide
  modified_base 38: mod_base = OTHER; note = 2'-O-methyl modified nucleotide
  modified_base 39: mod_base = OTHER; note = 2'-O-methyl modified nucleotide
  modified_base 40: mod_base = OTHER; note = 2'-O-methyl modified nucleotide
  modified_base 69: mod_base = OTHER; note = 2'-O-methyl modified nucleotide
  modified_base 70: mod_base = OTHER; note = 2'-O-methyl modified nucleotide
  modified_base 71: mod_base = OTHER; note = 2'-O-methyl modified nucleotide
  modified_base 72: mod_base = OTHER; note = 2'-O-methyl modified nucleotide
  modified_base 73: mod_base = OTHER; note = 2'-O-methyl modified nucleotide
  modified_base 74: mod_base = OTHER; note = 2'-O-methyl modified nucleotide
  modified_base 75: mod_base = OTHER; note = 2'-O-methyl modified nucleotide
  modified_base 76: mod_base = OTHER; note = 2'-O-methyl modified nucleotide
  modified_base 77: mod_base = OTHER; note = 2'-O-methyl modified nucleotide
  modified_base 78: mod_base = OTHER; note = 2'-O-methyl modified nucleotide
  modified_base 79: mod_base = OTHER; note = 2'-O-methyl modified nucleotide
  modified_base 80: mod_base = OTHER; note = 2'-O-methyl modified nucleotide
  modified_base 81: mod_base = OTHER; note = 2'-O-methyl modified nucleotide
  modified_base 82: mod_base = OTHER; note = 2'-O-methyl modified nucleotide
  modified_base 83: mod_base = OTHER; note = 2'-O-methyl modified nucleotide
  modified_base 84: mod_base = OTHER; note = 2'-O-methyl modified nucleotide
  modified_base 85: mod_base = OTHER; note = 2'-O-methyl modified nucleotide
  modified_base 86: mod_base = OTHER; note = 2'-O-methyl modified nucleotide
  modified_base 87: mod_base = OTHER; note = 2'-O-methyl modified nucleotide
  modified_base 88: mod_base = OTHER; note = 2'-O-methyl modified nucleotide
  modified_base 89: mod_base = OTHER; note = 2'-O-methyl modified nucleotide
  modified_base 90: mod_base = OTHER; note = 2'-O-methyl modified nucleotide
  modified_base 91: mod_base = OTHER; note = 2'-O-methyl modified nucleotide
  modified_base 92: mod_base = OTHER; note = 2'-O-methyl modified nucleotide
  modified_base 93: mod_base = OTHER; note = 2'-O-methyl modified nucleotide
  modified_base 94: mod_base = OTHER; note = 2'-O-methyl modified nucleotide
  modified_base 95: mod_base = OTHER; note = 2'-O-methyl modified nucleotide
  modified_base 96: mod_base = OTHER; note = 2'-O-methyl modified nucleotide
  modified_base 97: mod_base = OTHER; note = 2'-O-methyl modified nucleotide with phosphorothioate linkage
  modified_base 98: mod_base = OTHER; note = 2'-O-methyl modified nucleotide with phosphorothioate linkage
  modified_base 99: mod_base = OTHER; note = 2'-O-methyl modified nucleotide with phosphorothioate linkage
  modified_base 100: mod_base = OTHER; note = 2'-O-methyl modified nucleotide
  misc_difference 97..100: note = This region may encompass 0-4 nucleotides

SEQ ID NO: 2333 - RNA, 100 nt, synthetic construct; identical to SEQ ID NO: 1333
  source 1..100: mol_type = other RNA
  modified_base 1: mod_base = OTHER; note = 2'-O-methyl modified nucleotide with phosphorothioate linkage
  modified_base 2: mod_base = OTHER; note = 2'-O-methyl modified nucleotide with phosphorothioate linkage
  modified_base 3: mod_base = OTHER; note = 2'-O-methyl modified nucleotide with phosphorothioate linkage
  modified_base 29: mod_base = OTHER; note = 2'-O-methyl modified nucleotide
  modified_base 30: mod_base = OTHER; note = 2'-O-methyl modified nucleotide
  modified_base 31: mod_base = OTHER; note = 2'-O-methyl modified nucleotide
  modified_base 32: mod_base = OTHER; note = 2'-O-methyl modified nucleotide
  modified_base 33: mod_base = OTHER; note = 2'-O-methyl modified nucleotide
  modified_base 34: mod_base = OTHER; note = 2'-O-methyl modified nucleotide
  modified_base 35: mod_base = OTHER; note = 2'-O-methyl modified nucleotide
  modified_base 36: mod_base = OTHER; note = 2'-O-methyl modified nucleotide
  modified_base 37: mod_base = OTHER; note = 2'-O-methyl modified nucleotide
  modified_base 38: mod_base = OTHER; note = 2'-O-methyl modified nucleotide
  modified_base 39: mod_base = OTHER; note = 2'-O-methyl modified nucleotide
  modified_base 40: mod_base = OTHER; note = 2'-O-methyl modified nucleotide
  modified_base 69: mod_base = OTHER; note = 2'-O-methyl modified nucleotide
  modified_base 70: mod_base = OTHER; note = 2'-O-methyl modified nucleotide
  modified_base 71: mod_base = OTHER; note = 2'-O-methyl modified nucleotide
  modified_base 72: mod_base = OTHER; note = 2'-O-methyl modified nucleotide
  modified_base 73: mod_base = OTHER; note = 2'-O-methyl modified nucleotide
  modified_base 74: mod_base = OTHER; note = 2'-O-methyl modified nucleotide
  modified_base 75: mod_base = OTHER; note = 2'-O-methyl modified nucleotide
  modified_base 76: mod_base = OTHER; note = 2'-O-methyl modified nucleotide
  modified_base 77: mod_base = OTHER; note = 2'-O-methyl modified nucleotide
  modified_base 78: mod_base = OTHER; note = 2'-O-methyl modified nucleotide
  modified_base 79: mod_base = OTHER; note = 2'-O-methyl modified nucleotide
  modified_base 80: mod_base = OTHER; note = 2'-O-methyl modified nucleotide
  modified_base 81: mod_base = OTHER; note = 2'-O-methyl modified nucleotide
  modified_base 82: mod_base = OTHER; note = 2'-O-methyl modified nucleotide
  modified_base 83: mod_base = OTHER; note = 2'-O-methyl modified nucleotide
  modified_base 84: mod_base = OTHER; note = 2'-O-methyl modified nucleotide
  modified_base 85: mod_base = OTHER; note = 2'-O-methyl modified nucleotide
  modified_base 86: mod_base = OTHER; note = 2'-O-methyl modified nucleotide
  modified_base 87: mod_base = OTHER; note = 2'-O-methyl modified nucleotide
  modified_base 88: mod_base = OTHER; note = 2'-O-methyl modified nucleotide
  modified_base 89: mod_base = OTHER; note = 2'-O-methyl modified nucleotide
  modified_base 90: mod_base = OTHER; note = 2'-O-methyl modified nucleotide
  modified_base 91: mod_base = OTHER; note = 2'-O-methyl modified nucleotide
  modified_base 92: mod_base = OTHER; note = 2'-O-methyl modified nucleotide
  modified_base 93: mod_base = OTHER; note = 2'-O-methyl modified nucleotide
  modified_base 94: mod_base = OTHER; note = 2'-O-methyl modified nucleotide
  modified_base 95: mod_base = OTHER; note = 2'-O-methyl modified nucleotide
  modified_base 96: mod_base = OTHER; note = 2'-O-methyl modified nucleotide
  modified_base 97: mod_base = OTHER; note = 2'-O-methyl modified nucleotide with phosphorothioate linkage
  modified_base 98: mod_base = OTHER; note = 2'-O-methyl modified nucleotide with phosphorothioate linkage
  modified_base 99: mod_base = OTHER; note = 2'-O-methyl modified nucleotide with phosphorothioate linkage
  modified_base 100: mod_base = OTHER; note = 2'-O-methyl modified nucleotide
  misc_difference 97..100: note = This region may encompass 0-4 nucleotides

SEQ ID NO: 2334 - RNA, 100 nt, synthetic construct; identical to SEQ ID NO: 1334
  source 1..100: mol_type = other RNA
  modified_base 1: mod_base = OTHER; note = 2'-O-methyl modified nucleotide with phosphorothioate linkage
  modified_base 2: mod_base = OTHER; note = 2'-O-methyl modified nucleotide with phosphorothioate linkage
  modified_base 3: mod_base = OTHER; note = 2'-O-methyl modified nucleotide with phosphorothioate linkage
  modified_base 29: mod_base = OTHER; note = 2'-O-methyl modified nucleotide
  modified_base 30: mod_base = OTHER; note = 2'-O-methyl modified nucleotide
  modified_base 31: mod_base = OTHER; note = 2'-O-methyl modified nucleotide
  modified_base 32: mod_base = OTHER; note = 2'-O-methyl modified nucleotide
  modified_base 33: mod_base = OTHER; note = 2'-O-methyl modified nucleotide
  modified_base 34: mod_base = OTHER; note = 2'-O-methyl modified nucleotide
  modified_base 35: mod_base = OTHER; note = 2'-O-methyl modified nucleotide
  modified_base 36: mod_base = OTHER; note = 2'-O-methyl modified nucleotide
  modified_base 37: mod_base = OTHER; note = 2'-O-methyl modified nucleotide
  modified_base 38: mod_base = OTHER; note = 2'-O-methyl modified nucleotide
  modified_base 39: mod_base = OTHER; note = 2'-O-methyl modified nucleotide
  modified_base 40: mod_base = OTHER; note = 2'-O-methyl modified nucleotide
  modified_base 69: mod_base = OTHER; note = 2'-O-methyl modified nucleotide
  modified_base 70: mod_base = OTHER; note = 2'-O-methyl modified nucleotide
  modified_base 71: mod_base = OTHER; note = 2'-O-methyl modified nucleotide
  modified_base 72: mod_base = OTHER; note = 2'-O-methyl modified nucleotide
  modified_base 73: mod_base = OTHER; note = 2'-O-methyl modified nucleotide
  modified_base 74: mod_base = OTHER; note = 2'-O-methyl modified nucleotide
  modified_base 75: mod_base = OTHER; note = 2'-O-methyl modified nucleotide
  modified_base 76: mod_base = OTHER; note = 2'-O-methyl modified nucleotide
  modified_base 77: mod_base = OTHER; note = 2'-O-methyl modified nucleotide
  modified_base 78: mod_base = OTHER; note = 2'-O-methyl modified nucleotide
  modified_base 79: mod_base = OTHER; note = 2'-O-methyl modified nucleotide
  modified_base 80: mod_base = OTHER; note = 2'-O-methyl modified nucleotide
  modified_base 81: mod_base = OTHER; note = 2'-O-methyl modified nucleotide
  modified_base 82: mod_base = OTHER; note = 2'-O-methyl modified nucleotide
  modified_base 83: mod_base = OTHER; note = 2'-O-methyl modified nucleotide
  modified_base 84: mod_base = OTHER; note = 2'-O-methyl modified nucleotide
  modified_base 85: mod_base = OTHER; note = 2'-O-methyl modified nucleotide
  modified_base 86: mod_base = OTHER; note = 2'-O-methyl modified nucleotide
  modified_base 87: mod_base = OTHER; note = 2'-O-methyl modified nucleotide
  modified_base 88: mod_base = OTHER; note = 2'-O-methyl modified nucleotide
  modified_base 89: mod_base = OTHER; note = 2'-O-methyl modified nucleotide
  modified_base 90: mod_base = OTHER; note = 2'-O-methyl modified nucleotide
  modified_base 91: mod_base = OTHER; note = 2'-O-methyl modified nucleotide
  modified_base 92: mod_base = OTHER; note = 2'-O-methyl modified nucleotide
  modified_base 93: mod_base = OTHER; note = 2'-O-methyl modified nucleotide
  modified_base 94: mod_base = OTHER; note = 2'-O-methyl modified nucleotide
  modified_base 95: mod_base = OTHER; note = 2'-O-methyl modified nucleotide
  modified_base 96: mod_base = OTHER; note = 2'-O-methyl modified nucleotide
  modified_base 97: mod_base = OTHER; note = 2'-O-methyl modified nucleotide with phosphorothioate linkage
  modified_base 98: mod_base = OTHER; note = 2'-O-methyl modified nucleotide with phosphorothioate linkage
  modified_base 99: mod_base = OTHER; note = 2'-O-methyl modified nucleotide with phosphorothioate linkage
  modified_base 100: mod_base = OTHER; note = 2'-O-methyl modified nucleotide
  misc_difference 97..100: note = This region may encompass 0-4 nucleotides

SEQ ID NO: 2335 - RNA, 100 nt, synthetic construct; identical to SEQ ID NO: 1335
  source 1..100: mol_type = other RNA
  modified_base 1: mod_base = OTHER; note = 2'-O-methyl modified nucleotide with phosphorothioate linkage
  modified_base 2: mod_base = OTHER; note = 2'-O-methyl modified nucleotide with phosphorothioate linkage
  modified_base 3: mod_base = OTHER; note = 2'-O-methyl modified nucleotide with phosphorothioate linkage
  modified_base 29: mod_base = OTHER; note = 2'-O-methyl modified nucleotide
  modified_base 30: mod_base = OTHER; note = 2'-O-methyl modified nucleotide
  modified_base 31: mod_base = OTHER; note = 2'-O-methyl modified nucleotide
  modified_base 32: mod_base = OTHER; note = 2'-O-methyl modified nucleotide
  modified_base 33: mod_base = OTHER; note = 2'-O-methyl modified nucleotide
  modified_base 34: mod_base = OTHER; note = 2'-O-methyl modified nucleotide
  modified_base 35: mod_base = OTHER; note = 2'-O-methyl modified nucleotide
  modified_base 36: mod_base = OTHER; note = 2'-O-methyl modified nucleotide
  modified_base 37: mod_base = OTHER; note = 2'-O-methyl modified nucleotide
  modified_base 38: mod_base = OTHER; note = 2'-O-methyl modified nucleotide
  modified_base 39: mod_base = OTHER; note = 2'-O-methyl modified nucleotide
  modified_base 40: mod_base = OTHER; note = 2'-O-methyl modified nucleotide
  modified_base 69: mod_base = OTHER; note = 2'-O-methyl modified nucleotide
  modified_base 70: mod_base = OTHER; note = 2'-O-methyl modified nucleotide
  modified_base 71: mod_base = OTHER; note = 2'-O-methyl modified nucleotide
  modified_base 72: mod_base = OTHER; note = 2'-O-methyl modified nucleotide
  modified_base 73: mod_base = OTHER; note = 2'-O-methyl modified nucleotide
  modified_base 74: mod_base = OTHER; note = 2'-O-methyl modified nucleotide
  modified_base 75: mod_base = OTHER; note = 2'-O-methyl modified nucleotide
  modified_base 76: mod_base = OTHER; note = 2'-O-methyl modified nucleotide
  modified_base 77: mod_base = OTHER; note = 2'-O-methyl modified nucleotide
  modified_base 78: mod_base = OTHER; note = 2'-O-methyl modified nucleotide
  modified_base 79: mod_base = OTHER; note = 2'-O-methyl modified nucleotide
  modified_base 80: mod_base = OTHER; note = 2'-O-methyl modified nucleotide
  modified_base 81: mod_base = OTHER; note = 2'-O-methyl modified nucleotide
  modified_base 82: mod_base = OTHER; note = 2'-O-methyl modified nucleotide
  modified_base 83: mod_base = OTHER; note = 2'-O-methyl modified nucleotide
  modified_base 84: mod_base = OTHER; note = 2'-O-methyl modified nucleotide
  modified_base 85: mod_base = OTHER; note = 2'-O-methyl modified nucleotide
  modified_base 86: mod_base = OTHER; note = 2'-O-methyl modified nucleotide
  modified_base 87: mod_base = OTHER; note = 2'-O-methyl modified nucleotide
  modified_base 88: mod_base = OTHER; note = 2'-O-methyl modified nucleotide
  modified_base 89: mod_base = OTHER; note = 2'-O-methyl modified nucleotide
  modified_base 90: mod_base = OTHER; note = 2'-O-methyl modified nucleotide
  modified_base 91: mod_base = OTHER; note = 2'-O-methyl modified nucleotide
  modified_base 92: mod_base = OTHER; note = 2'-O-methyl modified nucleotide
  modified_base 93: mod_base = OTHER; note = 2'-O-methyl modified nucleotide
  modified_base 94: mod_base = OTHER; note = 2'-O-methyl modified nucleotide
  modified_base 95: mod_base = OTHER; note = 2'-O-methyl modified nucleotide
  modified_base 96: mod_base = OTHER; note = 2'-O-methyl modified nucleotide
  modified_base 97: mod_base = OTHER; note = 2'-O-methyl modified nucleotide with phosphorothioate linkage
  modified_base 98: mod_base = OTHER; note = 2'-O-methyl modified nucleotide with phosphorothioate linkage
  modified_base 99: mod_base = OTHER; note = 2'-O-methyl modified nucleotide with phosphorothioate linkage
  modified_base 100: mod_base = OTHER; note = 2'-O-methyl modified nucleotide
  misc_difference 97..100: note = This region may encompass 0-4 nucleotides

SEQ ID NO: 2336 - RNA, 100 nt, synthetic construct; identical to SEQ ID NO: 1336
  source 1..100: mol_type = other RNA
  modified_base 1: mod_base = OTHER; note = 2'-O-methyl modified nucleotide with phosphorothioate linkage
  modified_base 2: mod_base = OTHER; note = 2'-O-methyl modified nucleotide with phosphorothioate linkage
  modified_base 3: mod_base = OTHER; note = 2'-O-methyl modified nucleotide with phosphorothioate linkage
  modified_base 29: mod_base = OTHER; note = 2'-O-methyl modified nucleotide
  modified_base 30: mod_base = OTHER; note = 2'-O-methyl modified nucleotide
  modified_base 31: mod_base = OTHER; note = 2'-O-methyl modified nucleotide
  modified_base 32: mod_base = OTHER; note = 2'-O-methyl modified nucleotide
  modified_base 33: mod_base = OTHER; note = 2'-O-methyl modified nucleotide
  modified_base 34: mod_base = OTHER; note = 2'-O-methyl modified nucleotide
  modified_base 35: mod_base = OTHER; note = 2'-O-methyl modified nucleotide
  modified_base 36: mod_base = OTHER; note = 2'-O-methyl modified nucleotide
  modified_base 37: mod_base = OTHER; note = 2'-O-methyl modified nucleotide
  modified_base 38: mod_base = OTHER; note = 2'-O-methyl modified nucleotide
  modified_base 39: mod_base = OTHER; note = 2'-O-methyl modified nucleotide
  modified_base 40: mod_base = OTHER; note = 2'-O-methyl modified nucleotide
  modified_base 69: mod_base = OTHER; note = 2'-O-methyl modified nucleotide
  modified_base 70: mod_base = OTHER; note = 2'-O-methyl modified nucleotide
  modified_base 71: mod_base = OTHER; note = 2'-O-methyl modified nucleotide
  modified_base 72: mod_base = OTHER; note = 2'-O-methyl modified nucleotide
  modified_base 73: mod_base = OTHER; note = 2'-O-methyl modified nucleotide
  modified_base 74: mod_base = OTHER; note = 2'-O-methyl modified nucleotide
  modified_base 75: mod_base = OTHER; note = 2'-O-methyl modified nucleotide
  modified_base 76: mod_base = OTHER; note = 2'-O-methyl modified nucleotide
  modified_base 77: mod_base = OTHER; note = 2'-O-methyl modified nucleotide
  modified_base 78: mod_base = OTHER; note = 2'-O-methyl modified nucleotide
  modified_base 79: mod_base = OTHER; note = 2'-O-methyl modified nucleotide
  modified_base 80: mod_base = OTHER; note = 2'-O-methyl modified nucleotide
  modified_base 81: mod_base = OTHER; note = 2'-O-methyl modified nucleotide
  modified_base 82: mod_base = OTHER; note = 2'-O-methyl modified nucleotide
  modified_base 83: mod_base = OTHER; note = 2'-O-methyl modified nucleotide
  modified_base 84: mod_base = OTHER; note = 2'-O-methyl modified nucleotide
  modified_base 85: mod_base = OTHER; note = 2'-O-methyl modified nucleotide
  modified_base 86: mod_base = OTHER; note = 2'-O-methyl modified nucleotide
  modified_base 87: mod_base = OTHER; note = 2'-O-methyl modified nucleotide
  modified_base 88: mod_base = OTHER; note = 2'-O-methyl modified nucleotide
  modified_base 89: mod_base = OTHER; note = 2'-O-methyl modified nucleotide
  modified_base 90: mod_base = OTHER; note = 2'-O-methyl modified nucleotide
  modified_base 91: mod_base = OTHER; note = 2'-O-methyl modified nucleotide
  modified_base 92: mod_base = OTHER; note = 2'-O-methyl modified nucleotide
  modified_base 93: mod_base = OTHER; note = 2'-O-methyl modified nucleotide
  modified_base 94: mod_base = OTHER; note = 2'-O-methyl modified nucleotide
  modified_base 95: mod_base = OTHER; note = 2'-O-methyl modified nucleotide
  modified_base 96: mod_base = OTHER; note = 2'-O-methyl modified nucleotide
  modified_base 97: mod_base = OTHER; note = 2'-O-methyl modified nucleotide with phosphorothioate linkage
  modified_base 98: mod_base = OTHER; note = 2'-O-methyl modified nucleotide with phosphorothioate linkage
  modified_base 99: mod_base = OTHER; note = 2'-O-methyl modified nucleotide with phosphorothioate linkage
  modified_base 100: mod_base = OTHER; note = 2'-O-methyl modified nucleotide
  misc_difference 97..100: note = This region may encompass 0-4 nucleotides

SEQ ID NO: 2337 - RNA, 100 nt, synthetic construct; identical to SEQ ID NO: 1337
  source 1..100: mol_type = other RNA
  modified_base 1: mod_base = OTHER; note = 2'-O-methyl modified nucleotide with phosphorothioate linkage
  modified_base 2: mod_base = OTHER; note = 2'-O-methyl modified nucleotide with phosphorothioate linkage
  modified_base 3: mod_base = OTHER; note = 2'-O-methyl modified nucleotide with phosphorothioate linkage
  modified_base 29: mod_base = OTHER; note = 2'-O-methyl modified nucleotide
  modified_base 30: mod_base = OTHER; note = 2'-O-methyl modified nucleotide
  modified_base 31: mod_base = OTHER; note = 2'-O-methyl modified nucleotide
  modified_base 32: mod_base = OTHER; note = 2'-O-methyl modified nucleotide
  modified_base 33: mod_base = OTHER; note = 2'-O-methyl modified nucleotide
  modified_base 34: mod_base = OTHER; note = 2'-O-methyl modified nucleotide
  modified_base 35: mod_base = OTHER; note = 2'-O-methyl modified nucleotide
  modified_base 36: mod_base = OTHER; note = 2'-O-methyl modified nucleotide
  modified_base 37: mod_base = OTHER; note = 2'-O-methyl modified nucleotide
  modified_base 38: mod_base = OTHER; note = 2'-O-methyl modified nucleotide
  modified_base 39: mod_base = OTHER; note = 2'-O-methyl modified nucleotide
  modified_base 40: mod_base = OTHER; note = 2'-O-methyl modified nucleotide
  modified_base 69: mod_base = OTHER; note = 2'-O-methyl modified nucleotide
  modified_base 70: mod_base = OTHER; note = 2'-O-methyl modified nucleotide
  modified_base 71: mod_base = OTHER; note = 2'-O-methyl modified nucleotide
  modified_base 72: mod_base = OTHER; note = 2'-O-methyl modified nucleotide
  modified_base 73: mod_base = OTHER; note = 2'-O-methyl modified nucleotide
  modified_base 74: mod_base = OTHER; note = 2'-O-methyl modified nucleotide
  modified_base 75: mod_base = OTHER; note = 2'-O-methyl modified nucleotide
  modified_base 76: mod_base = OTHER; note = 2'-O-methyl modified nucleotide
  modified_base 77: mod_base = OTHER; note = 2'-O-methyl modified nucleotide
  modified_base 78: mod_base = OTHER; note = 2'-O-methyl modified nucleotide
  modified_base 79: mod_base = OTHER; note = 2'-O-methyl modified nucleotide
  modified_base 80: mod_base = OTHER; note = 2'-O-methyl modified nucleotide
  modified_base 81: mod_base = OTHER; note = 2'-O-methyl modified nucleotide
  modified_base 82: mod_base = OTHER; note = 2'-O-methyl modified nucleotide
  modified_base 83: mod_base = OTHER; note = 2'-O-methyl modified nucleotide
  modified_base 84: mod_base = OTHER; note = 2'-O-methyl modified nucleotide
  modified_base 85: mod_base = OTHER; note = 2'-O-methyl modified nucleotide
  modified_base 86: mod_base = OTHER; note = 2'-O-methyl modified nucleotide
  modified_base 87: mod_base = OTHER; note = 2'-O-methyl modified nucleotide
  modified_base 88: mod_base = OTHER; note = 2'-O-methyl modified nucleotide
  modified_base 89: mod_base = OTHER; note = 2'-O-methyl modified nucleotide
  modified_base 90: mod_base = OTHER; note = 2'-O-methyl modified nucleotide
  modified_base 91: mod_base = OTHER; note = 2'-O-methyl modified nucleotide
  modified_base 92: mod_base = OTHER; note = 2'-O-methyl modified nucleotide
  modified_base 93: mod_base = OTHER; note = 2'-O-methyl modified nucleotide
  modified_base 94: mod_base = OTHER; note = 2'-O-methyl modified nucleotide
  modified_base 95: mod_base = OTHER; note = 2'-O-methyl modified nucleotide
  modified_base 96: mod_base = OTHER; note = 2'-O-methyl modified nucleotide
  modified_base 97: mod_base = OTHER; note = 2'-O-methyl modified nucleotide with phosphorothioate linkage
  modified_base 98: mod_base = OTHER; note = 2'-O-methyl modified nucleotide with phosphorothioate linkage
  modified_base 99: mod_base = OTHER; note = 2'-O-methyl modified nucleotide with phosphorothioate linkage
  modified_base 100: mod_base = OTHER; note = 2'-O-methyl modified nucleotide
  misc_difference 97..100: note = This region may encompass 0-4 nucleotides

SEQ ID NO: 2338 - RNA, 100 nt, synthetic construct; identical to SEQ ID NO: 1338
  source 1..100: mol_type = other RNA
  modified_base 1: mod_base = OTHER; note = 2'-O-methyl modified nucleotide with phosphorothioate linkage
  modified_base 2: mod_base = OTHER; note = 2'-O-methyl modified nucleotide with phosphorothioate linkage
  modified_base 3: mod_base = OTHER; note = 2'-O-methyl modified nucleotide with phosphorothioate linkage
  modified_base 29: mod_base = OTHER; note = 2'-O-methyl modified nucleotide
  modified_base 30: mod_base = OTHER; note = 2'-O-methyl modified nucleotide
  modified_base 31: mod_base = OTHER; note = 2'-O-methyl modified nucleotide
  modified_base 32: mod_base = OTHER; note = 2'-O-methyl modified nucleotide
  modified_base 33: mod_base = OTHER; note = 2'-O-methyl modified nucleotide
  modified_base 34: mod_base = OTHER; note = 2'-O-methyl modified nucleotide
  modified_base 35: mod_base = OTHER; note = 2'-O-methyl modified nucleotide
  modified_base 36: mod_base = OTHER; note = 2'-O-methyl modified nucleotide
  modified_base 37: mod_base = OTHER; note = 2'-O-methyl modified nucleotide
  modified_base 38: mod_base = OTHER; note = 2'-O-methyl modified nucleotide
  modified_base 39: mod_base = OTHER; note = 2'-O-methyl modified nucleotide
  modified_base 40: mod_base = OTHER; note = 2'-O-methyl modified nucleotide
  modified_base 69: mod_base = OTHER; note = 2'-O-methyl modified nucleotide
  modified_base 70: mod_base = OTHER; note = 2'-O-methyl modified nucleotide
  modified_base 71: mod_base = OTHER; note = 2'-O-methyl modified nucleotide
  modified_base 72: mod_base = OTHER; note = 2'-O-methyl modified nucleotide
  modified_base 73: mod_base = OTHER; note = 2'-O-methyl modified nucleotide
  modified_base 74: mod_base = OTHER; note = 2'-O-methyl modified nucleotide
  modified_base 75: mod_base = OTHER; note = 2'-O-methyl modified nucleotide
  modified_base 76: mod_base = OTHER; note = 2'-O-methyl modified nucleotide
  modified_base 77: mod_base = OTHER; note = 2'-O-methyl modified nucleotide
  modified_base 78: mod_base = OTHER; note = 2'-O-methyl modified nucleotide
  modified_base 79: mod_base = OTHER; note = 2'-O-methyl modified nucleotide
  modified_base 80: mod_base = OTHER; note = 2'-O-methyl modified nucleotide
  modified_base 81: mod_base = OTHER; note = 2'-O-methyl modified nucleotide
  modified_base 82: mod_base = OTHER; note = 2'-O-methyl modified nucleotide
  modified_base 83: mod_base = OTHER; note = 2'-O-methyl modified nucleotide
  modified_base 84: mod_base = OTHER; note = 2'-O-methyl modified nucleotide
  modified_base 85: mod_base = OTHER; note = 2'-O-methyl modified nucleotide
  modified_base 86: mod_base = OTHER; note = 2'-O-methyl modified nucleotide
  modified_base 87: mod_base = OTHER; note = 2'-O-methyl modified nucleotide
  modified_base 88: mod_base = OTHER; note = 2'-O-methyl modified nucleotide
  modified_base 89: mod_base = OTHER; note = 2'-O-methyl modified nucleotide
  modified_base 90: mod_base = OTHER; note = 2'-O-methyl modified nucleotide
  modified_base 91: mod_base = OTHER; note = 2'-O-methyl modified nucleotide
  modified_base 92: mod_base = OTHER; note = 2'-O-methyl modified nucleotide
  modified_base 93: mod_base = OTHER; note = 2'-O-methyl modified nucleotide
  modified_base 94: mod_base = OTHER; note = 2'-O-methyl modified nucleotide
  modified_base 95: mod_base = OTHER; note = 2'-O-methyl modified nucleotide
  modified_base 96: mod_base = OTHER; note = 2'-O-methyl modified nucleotide
  modified_base 97: mod_base = OTHER; note = 2'-O-methyl modified nucleotide with phosphorothioate linkage
  modified_base 98: mod_base = OTHER; note = 2'-O-methyl modified nucleotide with phosphorothioate linkage
  modified_base 99: mod_base = OTHER; note = 2'-O-methyl modified nucleotide with phosphorothioate linkage
  modified_base 100: mod_base = OTHER; note = 2'-O-methyl modified nucleotide
  misc_difference 97..100: note = This region may encompass 0-4 nucleotides

SEQ ID NO: 2339 - RNA, 100 nt, synthetic construct; identical to SEQ ID NO: 1339
  source 1..100: mol_type = other RNA
  modified_base 1: mod_base = OTHER; note = 2'-O-methyl modified nucleotide with phosphorothioate linkage
  modified_base 2: mod_base = OTHER; note = 2'-O-methyl modified nucleotide with phosphorothioate linkage
  modified_base 3: mod_base = OTHER; note = 2'-O-methyl modified nucleotide with phosphorothioate linkage
  modified_base 29: mod_base = OTHER; note = 2'-O-methyl modified nucleotide
  modified_base 30: mod_base = OTHER; note = 2'-O-methyl modified nucleotide
  modified_base 31: mod_base = OTHER; note = 2'-O-methyl modified nucleotide
  modified_base 32: mod_base = OTHER; note = 2'-O-methyl modified nucleotide
  modified_base 33: mod_base = OTHER; note = 2'-O-methyl modified nucleotide
  modified_base 34: mod_base = OTHER; note = 2'-O-methyl modified nucleotide
  modified_base 35: mod_base = OTHER; note = 2'-O-methyl modified nucleotide
  modified_base 36: mod_base = OTHER; note = 2'-O-methyl modified nucleotide
  modified_base 37: mod_base = OTHER; note = 2'-O-methyl modified nucleotide
  modified_base 38: mod_base = OTHER; note = 2'-O-methyl modified nucleotide
  modified_base 39: mod_base = OTHER; note = 2'-O-methyl modified nucleotide
  modified_base 40: mod_base = OTHER; note = 2'-O-methyl modified nucleotide
  modified_base 69: mod_base = OTHER; note = 2'-O-methyl modified nucleotide
  modified_base 70: mod_base = OTHER; note = 2'-O-methyl modified nucleotide
  modified_base 71: mod_base = OTHER; note = 2'-O-methyl modified nucleotide
  modified_base 72: mod_base = OTHER; note = 2'-O-methyl modified nucleotide
  modified_base 73: mod_base = OTHER; note = 2'-O-methyl modified nucleotide
  modified_base 74: mod_base = OTHER; note = 2'-O-methyl modified nucleotide
  modified_base 75: mod_base = OTHER; note = 2'-O-methyl modified nucleotide
  modified_base 76: mod_base = OTHER; note = 2'-O-methyl modified nucleotide
  modified_base 77: mod_base = OTHER; note = 2'-O-methyl modified nucleotide
  modified_base 78: mod_base = OTHER; note = 2'-O-methyl modified nucleotide
  modified_base 79: mod_base = OTHER; note = 2'-O-methyl modified nucleotide
  modified_base 80: mod_base = OTHER; note = 2'-O-methyl modified nucleotide
  modified_base 81: mod_base = OTHER; note = 2'-O-methyl modified nucleotide
  modified_base 82: mod_base = OTHER; note = 2'-O-methyl modified nucleotide
  modified_base 83: mod_base = OTHER; note = 2'-O-methyl modified nucleotide
  modified_base 84: mod_base = OTHER; note = 2'-O-methyl modified nucleotide
  modified_base 85: mod_base = OTHER; note = 2'-O-methyl modified nucleotide
  modified_base 86: mod_base = OTHER; note = 2'-O-methyl modified nucleotide
  modified_base 87: mod_base = OTHER; note = 2'-O-methyl modified nucleotide
  modified_base 88: mod_base = OTHER; note = 2'-O-methyl modified nucleotide
  modified_base 89: mod_base = OTHER; note = 2'-O-methyl modified nucleotide
  modified_base 90: mod_base = OTHER; note = 2'-O-methyl modified nucleotide
  modified_base 91: mod_base = OTHER; note = 2'-O-methyl modified nucleotide
  modified_base 92: mod_base = OTHER; note = 2'-O-methyl modified nucleotide
  modified_base 93: mod_base = OTHER; note = 2'-O-methyl modified nucleotide
  modified_base 94: mod_base = OTHER; note = 2'-O-methyl modified nucleotide
  modified_base 95: mod_base = OTHER; note = 2'-O-methyl modified nucleotide
  modified_base 96: mod_base = OTHER; note = 2'-O-methyl modified nucleotide
  modified_base 97: mod_base = OTHER; note = 2'-O-methyl modified nucleotide with phosphorothioate linkage
  modified_base 98: mod_base = OTHER; note = 2'-O-methyl modified nucleotide with phosphorothioate linkage
  modified_base 99: mod_base = OTHER; note = 2'-O-methyl modified nucleotide with phosphorothioate linkage
  modified_base 100: mod_base = OTHER; note = 2'-O-methyl modified nucleotide
  misc_difference 97..100: note = This region may encompass 0-4 nucleotides

SEQ ID NO: 2340 - RNA, 100 nt, synthetic construct; identical to SEQ ID NO: 1340
  source 1..100: mol_type = other RNA
  modified_base 1: mod_base = OTHER; note = 2'-O-methyl modified nucleotide with phosphorothioate linkage
  modified_base 2: mod_base = OTHER; note = 2'-O-methyl modified nucleotide with phosphorothioate linkage
  modified_base 3: mod_base = OTHER; note = 2'-O-methyl modified nucleotide with phosphorothioate linkage
  modified_base 29: mod_base = OTHER; note = 2'-O-methyl modified nucleotide
  modified_base 30: mod_base = OTHER; note = 2'-O-methyl modified nucleotide
  modified_base 31: mod_base = OTHER; note = 2'-O-methyl modified nucleotide
  modified_base 32: mod_base = OTHER; note = 2'-O-methyl modified nucleotide
  modified_base 33: mod_base = OTHER; note = 2'-O-methyl modified nucleotide
  modified_base 34: mod_base = OTHER; note = 2'-O-methyl modified nucleotide
  modified_base 35: mod_base = OTHER; note = 2'-O-methyl modified nucleotide
  modified_base 36: mod_base = OTHER; note = 2'-O-methyl modified nucleotide
  modified_base 37: mod_base = OTHER; note = 2'-O-methyl modified nucleotide
  modified_base 38: mod_base = OTHER; note = 2'-O-methyl modified nucleotide
  modified_base 39: mod_base = OTHER; note = 2'-O-methyl modified nucleotide
  modified_base 40: mod_base = OTHER; note = 2'-O-methyl modified nucleotide
  modified_base 69: mod_base = OTHER; note = 2'-O-methyl modified nucleotide
  modified_base 70: mod_base = OTHER; note = 2'-O-methyl modified nucleotide
  modified_base 71: mod_base = OTHER; note = 2'-O-methyl modified nucleotide
  modified_base 72: mod_base = OTHER; note = 2'-O-methyl modified nucleotide
  modified_base 73: mod_base = OTHER; note = 2'-O-methyl modified nucleotide
  modified_base 74: mod_base = OTHER; note = 2'-O-methyl modified nucleotide
  modified_base 75: mod_base = OTHER; note = 2'-O-methyl modified nucleotide
  modified_base 76: mod_base = OTHER; note = 2'-O-methyl modified nucleotide
  modified_base 77: mod_base = OTHER; note = 2'-O-methyl modified nucleotide
  modified_base 78: mod_base = OTHER; note = 2'-O-methyl modified nucleotide
  modified_base 79: mod_base = OTHER; note = 2'-O-methyl modified nucleotide
  modified_base 80: mod_base = OTHER; note = 2'-O-methyl modified nucleotide
  modified_base 81: mod_base = OTHER; note = 2'-O-methyl modified nucleotide
  modified_base 82: mod_base = OTHER; note = 2'-O-methyl modified nucleotide
  modified_base 83: mod_base = OTHER; note = 2'-O-methyl modified nucleotide
  modified_base 84: mod_base = OTHER; note = 2'-O-methyl modified nucleotide
  modified_base 85: mod_base = OTHER; note = 2'-O-methyl modified nucleotide
  modified_base 86: mod_base = OTHER; note = 2'-O-methyl modified nucleotide
  modified_base 87: mod_base = OTHER; note = 2'-O-methyl modified nucleotide
  modified_base 88: mod_base = OTHER; note = 2'-O-methyl modified nucleotide
  modified_base 89: mod_base = OTHER; note = 2'-O-methyl modified nucleotide
  modified_base 90: mod_base = OTHER; note = 2'-O-methyl modified nucleotide
  modified_base 91: mod_base = OTHER; note = 2'-O-methyl modified nucleotide
  modified_base 92: mod_base = OTHER; note = 2'-O-methyl modified nucleotide
  modified_base 93: mod_base = OTHER; note = 2'-O-methyl modified nucleotide
  modified_base 94: mod_base = OTHER; note = 2'-O-methyl modified nucleotide
  modified_base 95: mod_base = OTHER; note = 2'-O-methyl modified nucleotide
  modified_base 96: mod_base = OTHER; note = 2'-O-methyl modified nucleotide
  modified_base 97: mod_base = OTHER; note = 2'-O-methyl modified nucleotide with phosphorothioate linkage
  modified_base 98: mod_base = OTHER; note = 2'-O-methyl modified nucleotide with phosphorothioate linkage
  modified_base 99: mod_base = OTHER; note = 2'-O-methyl modified nucleotide with phosphorothioate linkage
  modified_base 100: mod_base = OTHER; note = 2'-O-methyl modified nucleotide
  misc_difference 97..100: note = This region may encompass 0-4 nucleotides

SEQ ID NO: 2341 - RNA, 100 nt, synthetic construct; identical to SEQ ID NO: 1341
  source 1..100: mol_type = other RNA
  modified_base 1: mod_base = OTHER; note = 2'-O-methyl modified nucleotide with phosphorothioate linkage
  modified_base 2: mod_base = OTHER; note = 2'-O-methyl modified nucleotide with phosphorothioate linkage
  modified_base 3: mod_base = OTHER; note = 2'-O-methyl modified nucleotide with phosphorothioate linkage
  modified_base 29: mod_base = OTHER; note = 2'-O-methyl modified nucleotide
  modified_base 30: mod_base = OTHER; note = 2'-O-methyl modified nucleotide
  modified_base 31: mod_base = OTHER; note = 2'-O-methyl modified nucleotide
  modified_base 32: mod_base = OTHER; note = 2'-O-methyl modified nucleotide
  modified_base 33: mod_base = OTHER; note = 2'-O-methyl modified nucleotide
  modified_base 34: mod_base = OTHER; note = 2'-O-methyl modified nucleotide
  modified_base 35: mod_base = OTHER; note = 2'-O-methyl modified nucleotide
  modified_base 36: mod_base = OTHER; note = 2'-O-methyl modified nucleotide
  modified_base 37: mod_base = OTHER; note = 2'-O-methyl modified nucleotide
  modified_base 38: mod_base = OTHER; note = 2'-O-methyl modified nucleotide
  modified_base 39: mod_base = OTHER; note = 2'-O-methyl modified nucleotide
  modified_base 40: mod_base = OTHER; note = 2'-O-methyl modified nucleotide
  modified_base 69: mod_base = OTHER; note = 2'-O-methyl modified nucleotide
  modified_base 70: mod_base = OTHER; note = 2'-O-methyl modified nucleotide
  modified_base 71: mod_base = OTHER; note = 2'-O-methyl modified nucleotide
  modified_base 72: mod_base = OTHER; note = 2'-O-methyl modified nucleotide
  modified_base 73: mod_base = OTHER; note = 2'-O-methyl modified nucleotide
  modified_base 74: mod_base = OTHER; note = 2'-O-methyl modified nucleotide
  modified_base 75: mod_base = OTHER; note = 2'-O-methyl modified nucleotide
  modified_base 76: mod_base = OTHER; note = 2'-O-methyl modified nucleotide
  modified_base 77: mod_base = OTHER; note = 2'-O-methyl modified nucleotide
  modified_base 78: mod_base = OTHER; note = 2'-O-methyl modified nucleotide
  modified_base 79: mod_base = OTHER; note = 2'-O-methyl modified nucleotide
  modified_base 80: mod_base = OTHER; note = 2'-O-methyl modified nucleotide
  modified_base 81: mod_base = OTHER; note = 2'-O-methyl modified nucleotide
  modified_base 82: mod_base = OTHER; note = 2'-O-methyl modified nucleotide
  modified_base 83: mod_base = OTHER; note = 2'-O-methyl modified nucleotide
  modified_base 84: mod_base = OTHER; note = 2'-O-methyl modified nucleotide
  modified_base 85: mod_base = OTHER; note = 2'-O-methyl modified nucleotide
  modified_base 86: mod_base = OTHER; note = 2'-O-methyl modified nucleotide
  modified_base 87: mod_base = OTHER; note = 2'-O-methyl modified nucleotide
  modified_base 88: mod_base = OTHER; note = 2'-O-methyl modified nucleotide
  modified_base 89: mod_base = OTHER; note = 2'-O-methyl modified nucleotide
  modified_base 90: mod_base = OTHER; note = 2'-O-methyl modified nucleotide
  modified_base 91: mod_base = OTHER; note = 2'-O-methyl modified nucleotide
  modified_base 92: mod_base = OTHER; note = 2'-O-methyl modified nucleotide
  modified_base 93: mod_base = OTHER; note = 2'-O-methyl modified nucleotide
  modified_base 94: mod_base = OTHER; note = 2'-O-methyl modified nucleotide
  modified_base 95: mod_base = OTHER; note = 2'-O-methyl modified nucleotide
  modified_base 96: mod_base = OTHER; note = 2'-O-methyl modified nucleotide
  modified_base 97: mod_base = OTHER; note = 2'-O-methyl modified nucleotide with phosphorothioate linkage
  modified_base 98: mod_base = OTHER; note = 2'-O-methyl modified nucleotide with phosphorothioate linkage
  modified_base 99: mod_base = OTHER; note = 2'-O-methyl modified nucleotide with phosphorothioate linkage
  modified_base 100: mod_base = OTHER; note = 2'-O-methyl modified nucleotide
  misc_difference 97..100: note = This region may encompass 0-4 nucleotides

SEQ ID NO: 2342 - RNA, 100 nt, synthetic construct; identical to SEQ ID NO: 1342
  source 1..100: mol_type = other RNA
  modified_base 1: mod_base = OTHER; note = 2'-O-methyl modified nucleotide with phosphorothioate linkage
  modified_base 2: mod_base = OTHER; note = 2'-O-methyl modified nucleotide with phosphorothioate linkage
  modified_base 3: mod_base = OTHER; note = 2'-O-methyl modified nucleotide with phosphorothioate linkage
  modified_base 29: mod_base = OTHER; note = 2'-O-methyl modified nucleotide
  modified_base 30: mod_base = OTHER; note = 2'-O-methyl modified nucleotide
  modified_base 31: mod_base = OTHER; note = 2'-O-methyl modified nucleotide
  modified_base 32: mod_base = OTHER; note = 2'-O-methyl modified nucleotide
  modified_base 33: mod_base = OTHER; note = 2'-O-methyl modified nucleotide
  modified_base 34: mod_base = OTHER; note = 2'-O-methyl modified nucleotide
  modified_base 35: mod_base = OTHER; note = 2'-O-methyl modified nucleotide
  modified_base 36: mod_base = OTHER; note = 2'-O-methyl modified nucleotide
  modified_base 37: mod_base = OTHER; note = 2'-O-methyl modified nucleotide
  modified_base 38: mod_base = OTHER; note = 2'-O-methyl modified nucleotide
  modified_base 39: mod_base = OTHER; note = 2'-O-methyl modified nucleotide
  modified_base 40: mod_base = OTHER; note = 2'-O-methyl modified nucleotide
  modified_base 69: mod_base = OTHER; note = 2'-O-methyl modified nucleotide
  modified_base 70: mod_base = OTHER; note = 2'-O-methyl modified nucleotide
  modified_base 71: mod_base = OTHER; note = 2'-O-methyl modified nucleotide
  modified_base 72: mod_base = OTHER; note = 2'-O-methyl modified nucleotide
  modified_base 73: mod_base = OTHER; note = 2'-O-methyl modified nucleotide
  modified_base 74: mod_base = OTHER; note = 2'-O-methyl modified nucleotide
  modified_base 75: mod_base = OTHER; note = 2'-O-methyl modified nucleotide
  modified_base 76: mod_base = OTHER; note = 2'-O-methyl modified nucleotide
  modified_base 77: mod_base = OTHER; note = 2'-O-methyl modified nucleotide
  modified_base 78: mod_base = OTHER; note = 2'-O-methyl modified nucleotide
  modified_base 79: mod_base = OTHER; note = 2'-O-methyl modified nucleotide
  modified_base 80: mod_base = OTHER; note = 2'-O-methyl modified nucleotide
  modified_base 81: mod_base = OTHER; note = 2'-O-methyl modified nucleotide
  modified_base 82: mod_base = OTHER; note = 2'-O-methyl modified nucleotide
  modified_base 83: mod_base = OTHER; note = 2'-O-methyl modified nucleotide
  modified_base 84: mod_base = OTHER; note = 2'-O-methyl modified nucleotide
  modified_base 85: mod_base = OTHER; note = 2'-O-methyl modified nucleotide
  modified_base 86: mod_base = OTHER; note = 2'-O-methyl modified nucleotide
  modified_base 87: mod_base = OTHER; note = 2'-O-methyl modified nucleotide
  modified_base 88: mod_base = OTHER; note = 2'-O-methyl modified nucleotide
  modified_base 89: mod_base = OTHER; note = 2'-O-methyl modified nucleotide
  modified_base 90: mod_base = OTHER; note = 2'-O-methyl modified nucleotide
  modified_base 91: mod_base = OTHER; note = 2'-O-methyl modified nucleotide
  modified_base 92: mod_base = OTHER; note = 2'-O-methyl modified nucleotide
  modified_base 93: mod_base = OTHER; note = 2'-O-methyl modified nucleotide
  modified_base 94: mod_base = OTHER; note = 2'-O-methyl modified nucleotide
  modified_base 95: mod_base = OTHER; note = 2'-O-methyl modified nucleotide
  modified_base 96: mod_base = OTHER; note = 2'-O-methyl modified nucleotide
  modified_base 97: mod_base = OTHER; note = 2'-O-methyl modified nucleotide with phosphorothioate linkage
  modified_base 98: mod_base = OTHER; note = 2'-O-methyl modified nucleotide with phosphorothioate linkage
  modified_base 99: mod_base = OTHER; note = 2'-O-methyl modified nucleotide with phosphorothioate linkage
  modified_base 100: mod_base = OTHER; note = 2'-O-methyl modified nucleotide
  misc_difference 97..100: note = This region may encompass 0-4 nucleotides

SEQ ID NO: 2343 - RNA, 100 nt, synthetic construct; identical to SEQ ID NO: 1343
  source 1..100: mol_type = other RNA
  modified_base 1: mod_base = OTHER; note = 2'-O-methyl modified nucleotide with phosphorothioate linkage
  modified_base 2: mod_base = OTHER; note = 2'-O-methyl modified nucleotide with phosphorothioate linkage
  modified_base 3: mod_base = OTHER; note = 2'-O-methyl modified nucleotide with phosphorothioate linkage
  modified_base 29: mod_base = OTHER; note = 2'-O-methyl modified nucleotide
  modified_base 30: mod_base = OTHER; note = 2'-O-methyl modified nucleotide
  modified_base 31: mod_base = OTHER; note = 2'-O-methyl modified nucleotide
  modified_base 32: mod_base = OTHER; note = 2'-O-methyl modified nucleotide
  modified_base 33: mod_base = OTHER; note = 2'-O-methyl modified nucleotide
  modified_base 34: mod_base = OTHER; note = 2'-O-methyl modified nucleotide
  modified_base 35: mod_base = OTHER; note = 2'-O-methyl modified nucleotide
  modified_base 36: mod_base = OTHER; note = 2'-O-methyl modified nucleotide
  modified_base 37: mod_base = OTHER; note = 2'-O-methyl modified nucleotide
  modified_base 38: mod_base = OTHER; note = 2'-O-methyl modified nucleotide
  modified_base 39: mod_base = OTHER; note = 2'-O-methyl modified nucleotide
  modified_base 40: mod_base = OTHER; note = 2'-O-methyl modified nucleotide
  modified_base 69: mod_base = OTHER; note = 2'-O-methyl modified nucleotide
  modified_base 70: mod_base = OTHER; note = 2'-O-methyl modified nucleotide
  modified_base 71: mod_base = OTHER; note = 2'-O-methyl modified nucleotide
  modified_base 72: mod_base = OTHER; note = 2'-O-methyl modified nucleotide
  modified_base 73: mod_base = OTHER; note = 2'-O-methyl modified nucleotide
  modified_base 74: mod_base = OTHER; note = 2'-O-methyl modified nucleotide
  modified_base 75: mod_base = OTHER; note = 2'-O-methyl modified nucleotide
  modified_base 76: mod_base = OTHER; note = 2'-O-methyl modified nucleotide
  modified_base 77: mod_base = OTHER; note = 2'-O-methyl modified nucleotide
  modified_base 78: mod_base = OTHER; note = 2'-O-methyl modified nucleotide
  modified_base 79: mod_base = OTHER; note = 2'-O-methyl modified nucleotide
  modified_base 80: mod_base = OTHER; note = 2'-O-methyl modified nucleotide
  modified_base 81: mod_base = OTHER; note = 2'-O-methyl modified nucleotide
  modified_base 82: mod_base = OTHER; note = 2'-O-methyl modified nucleotide
  modified_base 83: mod_base = OTHER; note = 2'-O-methyl modified nucleotide
  modified_base 84: mod_base = OTHER; note = 2'-O-methyl modified nucleotide
  modified_base 85: mod_base = OTHER; note = 2'-O-methyl modified nucleotide
  modified_base 86: mod_base = OTHER; note = 2'-O-methyl modified nucleotide
  modified_base 87: mod_base = OTHER; note = 2'-O-methyl modified nucleotide
  modified_base 88: mod_base = OTHER; note = 2'-O-methyl modified nucleotide
  modified_base 89: mod_base = OTHER; note = 2'-O-methyl modified nucleotide
  modified_base 90: mod_base = OTHER; note = 2'-O-methyl modified nucleotide
  modified_base 91: mod_base = OTHER; note = 2'-O-methyl modified nucleotide
  modified_base 92: mod_base = OTHER; note = 2'-O-methyl modified nucleotide
  modified_base 93: mod_base = OTHER; note = 2'-O-methyl modified nucleotide
  modified_base 94: mod_base = OTHER; note = 2'-O-methyl modified nucleotide
  modified_base 95: mod_base = OTHER; note = 2'-O-methyl modified nucleotide
  modified_base 96: mod_base = OTHER; note = 2'-O-methyl modified nucleotide
  modified_base 97: mod_base = OTHER; note = 2'-O-methyl modified nucleotide with phosphorothioate linkage
  modified_base 98: mod_base = OTHER; note = 2'-O-methyl modified nucleotide with phosphorothioate linkage
  modified_base 99: mod_base = OTHER; note = 2'-O-methyl modified nucleotide with phosphorothioate linkage
  modified_base 100: mod_base = OTHER; note = 2'-O-methyl modified nucleotide
  misc_difference 97..100: note = This region may encompass 0-4 nucleotides

SEQ ID NO: 2344 - RNA, 100 nt, synthetic construct; identical to SEQ ID NO: 1344
  source 1..100: mol_type = other RNA
  modified_base 1: mod_base = OTHER; note = 2'-O-methyl modified nucleotide with phosphorothioate linkage
  modified_base 2: mod_base = OTHER; note = 2'-O-methyl modified nucleotide with phosphorothioate linkage
  modified_base 3: mod_base = OTHER; note = 2'-O-methyl modified nucleotide with phosphorothioate linkage
  modified_base 29: mod_base = OTHER; note = 2'-O-methyl modified nucleotide
  modified_base 30: mod_base = OTHER; note = 2'-O-methyl modified nucleotide
  modified_base 31: mod_base = OTHER; note = 2'-O-methyl modified nucleotide
  modified_base 32: mod_base = OTHER; note = 2'-O-methyl modified nucleotide
  modified_base 33: mod_base = OTHER; note = 2'-O-methyl modified nucleotide
  modified_base 34: mod_base = OTHER; note = 2'-O-methyl modified nucleotide
  modified_base 35: mod_base = OTHER; note = 2'-O-methyl modified nucleotide
  modified_base 36: mod_base = OTHER; note = 2'-O-methyl modified nucleotide
  modified_base 37: mod_base = OTHER; note = 2'-O-methyl modified nucleotide
  modified_base 38: mod_base = OTHER; note = 2'-O-methyl modified nucleotide
  modified_base 39: mod_base = OTHER; note = 2'-O-methyl modified nucleotide
  modified_base 40: mod_base = OTHER; note = 2'-O-methyl modified nucleotide
  modified_base 69: mod_base = OTHER; note = 2'-O-methyl modified nucleotide
  modified_base 70: mod_base = OTHER; note = 2'-O-methyl modified nucleotide
  modified_base 71: mod_base = OTHER; note = 2'-O-methyl modified nucleotide
  modified_base 72: mod_base = OTHER; note = 2'-O-methyl modified nucleotide
  modified_base 73: mod_base = OTHER; note = 2'-O-methyl modified nucleotide
  modified_base 74: mod_base = OTHER; note = 2'-O-methyl modified nucleotide
  modified_base 75: mod_base = OTHER; note = 2'-O-methyl modified nucleotide
  modified_base 76: mod_base = OTHER; note = 2'-O-methyl modified nucleotide
  modified_base 77: mod_base = OTHER; note = 2'-O-methyl modified nucleotide
  modified_base 78: mod_base = OTHER; note = 2'-O-methyl modified nucleotide
  modified_base 79: mod_base = OTHER; note = 2'-O-methyl modified nucleotide
  modified_base 80: mod_base = OTHER; note = 2'-O-methyl modified nucleotide
  modified_base 81: mod_base = OTHER; note = 2'-O-methyl modified nucleotide
  modified_base 82: mod_base = OTHER; note = 2'-O-methyl modified nucleotide
  modified_base 83: mod_base = OTHER; note = 2'-O-methyl modified nucleotide
  modified_base 84: mod_base = OTHER; note = 2'-O-methyl modified nucleotide
  modified_base 85: mod_base = OTHER; note = 2'-O-methyl modified nucleotide
  modified_base 86: mod_base = OTHER; note = 2'-O-methyl modified nucleotide
  modified_base 87: mod_base = OTHER; note = 2'-O-methyl modified nucleotide
  modified_base 88: mod_base = OTHER; note = 2'-O-methyl modified nucleotide
  modified_base 89: mod_base = OTHER; note = 2'-O-methyl modified nucleotide
  modified_base 90: mod_base = OTHER; note = 2'-O-methyl modified nucleotide
  modified_base 91: mod_base = OTHER; note = 2'-O-methyl modified nucleotide
  modified_base 92: mod_base = OTHER; note = 2'-O-methyl modified nucleotide
  modified_base 93: mod_base = OTHER; note = 2'-O-methyl modified nucleotide
  modified_base 94: mod_base = OTHER; note = 2'-O-methyl modified nucleotide
  modified_base 95: mod_base = OTHER; note = 2'-O-methyl modified nucleotide
  modified_base 96: mod_base = OTHER; note = 2'-O-methyl modified nucleotide
  modified_base 97: mod_base = OTHER; note = 2'-O-methyl modified nucleotide with phosphorothioate linkage
  modified_base 98: mod_base = OTHER; note = 2'-O-methyl modified nucleotide with phosphorothioate linkage
  modified_base 99: mod_base = OTHER; note = 2'-O-methyl modified nucleotide with phosphorothioate linkage
  modified_base 100: mod_base = OTHER; note = 2'-O-methyl modified nucleotide
  misc_difference 97..100: note = This region may encompass 0-4 nucleotides

SEQ ID NO: 2345 - RNA, 100 nt, synthetic construct; identical to SEQ ID NO: 1345
  source 1..100: mol_type = other RNA
  modified_base 1: mod_base = OTHER; note = 2'-O-methyl modified nucleotide with phosphorothioate linkage
  modified_base 2: mod_base = OTHER; note = 2'-O-methyl modified nucleotide with phosphorothioate linkage
  modified_base 3: mod_base = OTHER; note = 2'-O-methyl modified nucleotide with phosphorothioate linkage
  modified_base 29: mod_base = OTHER; note = 2'-O-methyl modified nucleotide
  modified_base 30: mod_base = OTHER; note = 2'-O-methyl modified nucleotide
  modified_base 31: mod_base = OTHER; note = 2'-O-methyl modified nucleotide
  modified_base 32: mod_base = OTHER; note = 2'-O-methyl modified nucleotide
  modified_base 33: mod_base = OTHER; note = 2'-O-methyl modified nucleotide
  modified_base 34: mod_base = OTHER; note = 2'-O-methyl modified nucleotide
  modified_base 35: mod_base = OTHER; note = 2'-O-methyl modified nucleotide
  modified_base 36: mod_base = OTHER; note = 2'-O-methyl modified nucleotide
  modified_base 37: mod_base = OTHER; note = 2'-O-methyl modified nucleotide
  modified_base 38: mod_base = OTHER; note = 2'-O-methyl modified nucleotide
  modified_base 39: mod_base = OTHER; note = 2'-O-methyl modified nucleotide
  modified_base 40: mod_base = OTHER; note = 2'-O-methyl modified nucleotide
  modified_base 69: mod_base = OTHER; note = 2'-O-methyl modified nucleotide
  modified_base 70: mod_base = OTHER; note = 2'-O-methyl modified nucleotide
  modified_base 71: mod_base = OTHER; note = 2'-O-methyl modified nucleotide
  modified_base 72: mod_base = OTHER; note = 2'-O-methyl modified nucleotide
  modified_base 73: mod_base = OTHER; note = 2'-O-methyl modified nucleotide
  modified_base 74: mod_base = OTHER; note = 2'-O-methyl modified nucleotide
  modified_base 75: mod_base = OTHER; note = 2'-O-methyl modified nucleotide
  modified_base 76: mod_base = OTHER; note = 2'-O-methyl modified nucleotide
  modified_base 77: mod_base = OTHER; note = 2'-O-methyl modified nucleotide
  modified_base 78: mod_base = OTHER; note = 2'-O-methyl modified nucleotide
  modified_base 79: mod_base = OTHER; note = 2'-O-methyl modified nucleotide
  modified_base 80: mod_base = OTHER; note = 2'-O-methyl modified nucleotide
  modified_base 81: mod_base = OTHER; note = 2'-O-methyl modified nucleotide
  modified_base 82: mod_base = OTHER; note = 2'-O-methyl modified nucleotide
  modified_base 83: mod_base = OTHER; note = 2'-O-methyl modified nucleotide
  modified_base 84: mod_base = OTHER; note = 2'-O-methyl modified nucleotide
  modified_base 85: mod_base = OTHER; note = 2'-O-methyl modified nucleotide
  modified_base 86: mod_base = OTHER; note = 2'-O-methyl modified nucleotide
  modified_base 87: mod_base = OTHER; note = 2'-O-methyl modified nucleotide
  modified_base 88: mod_base = OTHER; note = 2'-O-methyl modified nucleotide
  modified_base 89: mod_base = OTHER; note = 2'-O-methyl modified nucleotide
  modified_base 90: mod_base = OTHER; note = 2'-O-methyl modified nucleotide
  modified_base 91: mod_base = OTHER; note = 2'-O-methyl modified nucleotide
  modified_base 92: mod_base = OTHER; note = 2'-O-methyl modified nucleotide
  modified_base 93: mod_base = OTHER; note = 2'-O-methyl modified nucleotide
  modified_base 94: mod_base = OTHER; note = 2'-O-methyl modified nucleotide
  modified_base 95: mod_base = OTHER; note = 2'-O-methyl modified nucleotide
  modified_base 96: mod_base = OTHER; note = 2'-O-methyl modified nucleotide
  modified_base 97: mod_base = OTHER; note = 2'-O-methyl modified nucleotide with phosphorothioate linkage
  modified_base 98: mod_base = OTHER; note = 2'-O-methyl modified nucleotide with phosphorothioate linkage
  modified_base 99: mod_base = OTHER; note = 2'-O-methyl modified nucleotide with phosphorothioate linkage
  modified_base 100: mod_base = OTHER; note = 2'-O-methyl modified nucleotide
  misc_difference 97..100: note = This region may encompass 0-4 nucleotides

SEQ ID NO: 2346 - RNA, 100 nt, synthetic construct; identical to SEQ ID NO: 1346
  source 1..100: mol_type = other RNA
  modified_base 1: mod_base = OTHER; note = 2'-O-methyl modified nucleotide with phosphorothioate linkage
  modified_base 2: mod_base = OTHER; note = 2'-O-methyl modified nucleotide with phosphorothioate linkage
  modified_base 3: mod_base = OTHER; note = 2'-O-methyl modified nucleotide with phosphorothioate linkage
  modified_base 29: mod_base = OTHER; note = 2'-O-methyl modified nucleotide
  modified_base 30: mod_base = OTHER; note = 2'-O-methyl modified nucleotide
  modified_base 31: mod_base = OTHER; note = 2'-O-methyl modified nucleotide
  modified_base 32: mod_base = OTHER; note = 2'-O-methyl modified nucleotide
  modified_base 33: mod_base = OTHER; note = 2'-O-methyl modified nucleotide
  modified_base 34: mod_base = OTHER; note = 2'-O-methyl modified nucleotide
  modified_base 35: mod_base = OTHER; note = 2'-O-methyl modified nucleotide
  modified_base 36: mod_base = OTHER; note = 2'-O-methyl modified nucleotide
  modified_base 37: mod_base = OTHER; note = 2'-O-methyl modified nucleotide
  modified_base 38: mod_base = OTHER; note = 2'-O-methyl modified nucleotide
  modified_base 39: mod_base = OTHER; note = 2'-O-methyl modified nucleotide
  modified_base 40: mod_base = OTHER; note = 2'-O-methyl modified nucleotide
  modified_base 69: mod_base = OTHER; note = 2'-O-methyl modified nucleotide
  modified_base 70: mod_base = OTHER; note = 2'-O-methyl modified nucleotide
  modified_base 71: mod_base = OTHER; note = 2'-O-methyl modified nucleotide
  modified_base 72: mod_base = OTHER; note = 2'-O-methyl modified nucleotide
  modified_base 73: mod_base = OTHER; note = 2'-O-methyl modified nucleotide
  modified_base 74: mod_base = OTHER; note = 2'-O-methyl modified nucleotide
  modified_base 75: mod_base = OTHER; note = 2'-O-methyl modified nucleotide
  modified_base 76: mod_base = OTHER; note = 2'-O-methyl modified nucleotide
  modified_base 77: mod_base = OTHER; note = 2'-O-methyl modified nucleotide
  modified_base 78: mod_base = OTHER; note = 2'-O-methyl modified nucleotide
  modified_base 79: mod_base = OTHER; note = 2'-O-methyl modified nucleotide
  modified_base 80: mod_base = OTHER; note = 2'-O-methyl modified nucleotide
  modified_base 81: mod_base = OTHER; note = 2'-O-methyl modified nucleotide
  modified_base 82: mod_base = OTHER; note = 2'-O-methyl modified nucleotide
  modified_base 83: mod_base = OTHER; note = 2'-O-methyl modified nucleotide
  modified_base 84: mod_base = OTHER; note = 2'-O-methyl modified nucleotide
  modified_base 85: mod_base = OTHER; note = 2'-O-methyl modified nucleotide
  modified_base 86: mod_base = OTHER; note = 2'-O-methyl modified nucleotide
  modified_base 87: mod_base = OTHER; note = 2'-O-methyl modified nucleotide
  modified_base 88: mod_base = OTHER; note = 2'-O-methyl modified nucleotide
  modified_base 89: mod_base = OTHER; note = 2'-O-methyl modified nucleotide
  modified_base 90: mod_base = OTHER; note = 2'-O-methyl modified nucleotide
  modified_base 91: mod_base = OTHER; note = 2'-O-methyl modified nucleotide
  modified_base 92: mod_base = OTHER; note = 2'-O-methyl modified nucleotide
  modified_base 93: mod_base = OTHER; note = 2'-O-methyl modified nucleotide
  modified_base 94: mod_base = OTHER; note = 2'-O-methyl modified nucleotide
  modified_base 95: mod_base = OTHER; note = 2'-O-methyl modified nucleotide
  modified_base 96: mod_base = OTHER; note = 2'-O-methyl modified nucleotide
  modified_base 97: mod_base = OTHER; note = 2'-O-methyl modified nucleotide with phosphorothioate linkage
  modified_base 98: mod_base = OTHER; note = 2'-O-methyl modified nucleotide with phosphorothioate linkage
  modified_base 99: mod_base = OTHER; note = 2'-O-methyl modified nucleotide with phosphorothioate linkage
  modified_base 100: mod_base = OTHER; note = 2'-O-methyl modified nucleotide
  misc_difference 97..100: note = This region may encompass 0-4 nucleotides

SEQ ID NO: 2347 - RNA, 100 nt, synthetic construct; identical to SEQ ID NO: 1347
  source 1..100: mol_type = other RNA
  modified_base 1: mod_base = OTHER; note = 2'-O-methyl modified nucleotide with phosphorothioate linkage
  modified_base 2: mod_base = OTHER; note = 2'-O-methyl modified nucleotide with phosphorothioate linkage
  modified_base 3: mod_base = OTHER; note = 2'-O-methyl modified nucleotide with phosphorothioate linkage
  modified_base 29: mod_base = OTHER; note = 2'-O-methyl modified nucleotide
  modified_base 30: mod_base = OTHER; note = 2'-O-methyl modified nucleotide
  modified_base 31: mod_base = OTHER; note = 2'-O-methyl modified nucleotide
  modified_base 32: mod_base = OTHER; note = 2'-O-methyl modified nucleotide
  modified_base 33: mod_base = OTHER; note = 2'-O-methyl modified nucleotide
  modified_base 34: mod_base = OTHER; note = 2'-O-methyl modified nucleotide
  modified_base 35: mod_base = OTHER; note = 2'-O-methyl modified nucleotide
  modified_base 36: mod_base = OTHER; note = 2'-O-methyl modified nucleotide
  modified_base 37: mod_base = OTHER; note = 2'-O-methyl modified nucleotide
  modified_base 38: mod_base = OTHER; note = 2'-O-methyl modified nucleotide
  modified_base 39: mod_base = OTHER; note = 2'-O-methyl modified nucleotide
  modified_base 40: mod_base = OTHER; note = 2'-O-methyl modified nucleotide
  modified_base 69: mod_base = OTHER; note = 2'-O-methyl modified nucleotide
  modified_base 70: mod_base = OTHER; note = 2'-O-methyl modified nucleotide
  modified_base 71: mod_base = OTHER; note = 2'-O-methyl modified nucleotide
  modified_base 72: mod_base = OTHER; note = 2'-O-methyl modified nucleotide
  modified_base 73: mod_base = OTHER; note = 2'-O-methyl modified nucleotide
  modified_base 74: mod_base = OTHER; note = 2'-O-methyl modified nucleotide
  modified_base 75: mod_base = OTHER; note = 2'-O-methyl modified nucleotide
  modified_base 76: mod_base = OTHER; note = 2'-O-methyl modified nucleotide
  modified_base 77: mod_base = OTHER; note = 2'-O-methyl modified nucleotide
  modified_base 78: mod_base = OTHER; note = 2'-O-methyl modified nucleotide
  modified_base 79: mod_base = OTHER; note = 2'-O-methyl modified nucleotide
  modified_base 80: mod_base = OTHER; note = 2'-O-methyl modified nucleotide
  modified_base 81: mod_base = OTHER; note = 2'-O-methyl modified nucleotide
  modified_base 82: mod_base = OTHER; note = 2'-O-methyl modified nucleotide
  modified_base 83: mod_base = OTHER; note = 2'-O-methyl modified nucleotide
  modified_base 84: mod_base = OTHER; note = 2'-O-methyl modified nucleotide
  modified_base 85: mod_base = OTHER; note = 2'-O-methyl modified nucleotide
  modified_base 86: mod_base = OTHER; note = 2'-O-methyl modified nucleotide
  modified_base 87: mod_base = OTHER; note = 2'-O-methyl modified nucleotide
  modified_base 88: mod_base = OTHER; note = 2'-O-methyl modified nucleotide
  modified_base 89: mod_base = OTHER; note = 2'-O-methyl modified nucleotide
  modified_base 90: mod_base = OTHER; note = 2'-O-methyl modified nucleotide
  modified_base 91: mod_base = OTHER; note = 2'-O-methyl modified nucleotide
  modified_base 92: mod_base = OTHER; note = 2'-O-methyl modified nucleotide
  modified_base 93: mod_base = OTHER; note = 2'-O-methyl modified nucleotide
  modified_base 94: mod_base = OTHER; note = 2'-O-methyl modified nucleotide
  modified_base 95: mod_base = OTHER; note = 2'-O-methyl modified nucleotide
  modified_base 96: mod_base = OTHER; note = 2'-O-methyl modified nucleotide
  modified_base 97: mod_base = OTHER; note = 2'-O-methyl modified nucleotide with phosphorothioate linkage
  modified_base 98: mod_base = OTHER; note = 2'-O-methyl modified nucleotide with phosphorothioate linkage
  modified_base 99: mod_base = OTHER; note = 2'-O-methyl modified nucleotide with phosphorothioate linkage
  modified_base 100: mod_base = OTHER; note = 2'-O-methyl modified nucleotide
  misc_difference 97..100: note = This region may encompass 0-4 nucleotides

SEQ ID NO: 2348 - RNA, 100 nt, synthetic construct; identical to SEQ ID NO: 1348
  source 1..100: mol_type = other RNA
  modified_base 1: mod_base = OTHER; note = 2'-O-methyl modified nucleotide with phosphorothioate linkage
  modified_base 2: mod_base = OTHER; note = 2'-O-methyl modified nucleotide with phosphorothioate linkage
  modified_base 3: mod_base = OTHER; note = 2'-O-methyl modified nucleotide with phosphorothioate linkage
  modified_base 29: mod_base = OTHER; note = 2'-O-methyl modified nucleotide
  modified_base 30: mod_base = OTHER; note = 2'-O-methyl modified nucleotide
  modified_base 31: mod_base = OTHER; note = 2'-O-methyl modified nucleotide
  modified_base 32: mod_base = OTHER; note = 2'-O-methyl modified nucleotide
  modified_base 33: mod_base = OTHER; note = 2'-O-methyl modified nucleotide
  modified_base 34: mod_base = OTHER; note = 2'-O-methyl modified nucleotide
  modified_base 35: mod_base = OTHER; note = 2'-O-methyl modified nucleotide
  modified_base 36: mod_base = OTHER; note = 2'-O-methyl modified nucleotide
  modified_base 37: mod_base = OTHER; note = 2'-O-methyl modified nucleotide
  modified_base 38: mod_base = OTHER; note = 2'-O-methyl modified nucleotide
  modified_base 39: mod_base = OTHER; note = 2'-O-methyl modified nucleotide
  modified_base 40: mod_base = OTHER; note = 2'-O-methyl modified nucleotide
  modified_base 69: mod_base = OTHER; note = 2'-O-methyl modified nucleotide
  modified_base 70: mod_base = OTHER; note = 2'-O-methyl modified nucleotide
  modified_base 71: mod_base = OTHER; note = 2'-O-methyl modified nucleotide
  modified_base 72: mod_base = OTHER; note = 2'-O-methyl modified nucleotide
  modified_base 73: mod_base = OTHER; note = 2'-O-methyl modified nucleotide
  modified_base 74: mod_base = OTHER; note = 2'-O-methyl modified nucleotide
  modified_base 75: mod_base = OTHER; note = 2'-O-methyl modified nucleotide
  modified_base 76: mod_base = OTHER; note = 2'-O-methyl modified nucleotide
  modified_base 77: mod_base = OTHER; note = 2'-O-methyl modified nucleotide
  modified_base 78: mod_base = OTHER; note = 2'-O-methyl modified nucleotide
  modified_base 79: mod_base = OTHER; note = 2'-O-methyl modified nucleotide
  modified_base 80: mod_base = OTHER; note = 2'-O-methyl modified nucleotide
  modified_base 81: mod_base = OTHER; note = 2'-O-methyl modified nucleotide
  modified_base 82: mod_base = OTHER; note = 2'-O-methyl modified nucleotide
  modified_base 83: mod_base = OTHER; note = 2'-O-methyl modified nucleotide
  modified_base 84: mod_base = OTHER; note = 2'-O-methyl modified nucleotide
  modified_base 85: mod_base = OTHER; note = 2'-O-methyl modified nucleotide
  modified_base 86: mod_base = OTHER; note = 2'-O-methyl modified nucleotide
  modified_base 87: mod_base = OTHER; note = 2'-O-methyl modified nucleotide
  modified_base 88: mod_base = OTHER; note = 2'-O-methyl modified nucleotide
  modified_base 89: mod_base = OTHER; note = 2'-O-methyl modified nucleotide
  modified_base 90: mod_base = OTHER; note = 2'-O-methyl modified nucleotide
  modified_base 91: mod_base = OTHER; note = 2'-O-methyl modified nucleotide
  modified_base 92: mod_base = OTHER; note = 2'-O-methyl modified nucleotide
  modified_base 93: mod_base = OTHER; note = 2'-O-methyl modified nucleotide
  modified_base 94: mod_base = OTHER; note = 2'-O-methyl modified nucleotide
  modified_base 95: mod_base = OTHER; note = 2'-O-methyl modified nucleotide
  modified_base 96: mod_base = OTHER; note = 2'-O-methyl modified nucleotide
  modified_base 97: mod_base = OTHER; note = 2'-O-methyl modified nucleotide with phosphorothioate linkage
  modified_base 98: mod_base = OTHER; note = 2'-O-methyl modified nucleotide with phosphorothioate linkage
  modified_base 99: mod_base = OTHER; note = 2'-O-methyl modified nucleotide with phosphorothioate linkage
  modified_base 100: mod_base = OTHER; note = 2'-O-methyl modified nucleotide
  misc_difference 97..100: note = This region may encompass 0-4 nucleotides

SEQ ID NO: 2349 - RNA, 100 nt, synthetic construct; identical to SEQ ID NO: 1349
  source 1..100: mol_type = other RNA
  modified_base 1: mod_base = OTHER; note = 2'-O-methyl modified nucleotide with phosphorothioate linkage
  modified_base 2: mod_base = OTHER; note = 2'-O-methyl modified nucleotide with phosphorothioate linkage
  modified_base 3: mod_base = OTHER; note = 2'-O-methyl modified nucleotide with phosphorothioate linkage
  modified_base 29: mod_base = OTHER; note = 2'-O-methyl modified nucleotide
  modified_base 30: mod_base = OTHER; note = 2'-O-methyl modified nucleotide
  modified_base 31: mod_base = OTHER; note = 2'-O-methyl modified nucleotide
  modified_base 32: mod_base = OTHER; note = 2'-O-methyl modified nucleotide
  modified_base 33: mod_base = OTHER; note = 2'-O-methyl modified nucleotide
  modified_base 34: mod_base = OTHER; note = 2'-O-methyl modified nucleotide
  modified_base 35: mod_base = OTHER; note = 2'-O-methyl modified nucleotide
  modified_base 36: mod_base = OTHER; note = 2'-O-methyl modified nucleotide
  modified_base 37: mod_base = OTHER; note = 2'-O-methyl modified nucleotide
  modified_base 38: mod_base = OTHER; note = 2'-O-methyl modified nucleotide
  modified_base 39: mod_base = OTHER; note = 2'-O-methyl modified nucleotide
  modified_base 40: mod_base = OTHER; note = 2'-O-methyl modified nucleotide
  modified_base 69: mod_base = OTHER; note = 2'-O-methyl modified nucleotide
  modified_base 70: mod_base = OTHER; note = 2'-O-methyl modified nucleotide
  modified_base 71: mod_base = OTHER; note = 2'-O-methyl modified nucleotide
  modified_base 72: mod_base = OTHER; note = 2'-O-methyl modified nucleotide
  modified_base 73: mod_base = OTHER; note = 2'-O-methyl modified nucleotide
  modified_base 74: mod_base = OTHER; note = 2'-O-methyl modified nucleotide
  modified_base 75: mod_base = OTHER; note = 2'-O-methyl modified nucleotide
  modified_base 76: mod_base = OTHER; note = 2'-O-methyl modified nucleotide
  modified_base 77: mod_base = OTHER; note = 2'-O-methyl modified nucleotide
  modified_base 78: mod_base = OTHER; note = 2'-O-methyl modified nucleotide
  modified_base 79: mod_base = OTHER; note = 2'-O-methyl modified nucleotide
  modified_base 80: mod_base = OTHER; note = 2'-O-methyl modified nucleotide
  modified_base 81: mod_base = OTHER; note = 2'-O-methyl modified nucleotide
  modified_base 82: mod_base = OTHER; note = 2'-O-methyl modified nucleotide
  modified_base 83: mod_base = OTHER; note = 2'-O-methyl modified nucleotide
  modified_base 84: mod_base = OTHER; note = 2'-O-methyl modified nucleotide
  modified_base 85: mod_base = OTHER; note = 2'-O-methyl modified nucleotide
  modified_base 86: mod_base = OTHER; note = 2'-O-methyl modified nucleotide
  modified_base 87: mod_base = OTHER; note = 2'-O-methyl modified nucleotide
  modified_base 88: mod_base = OTHER; note = 2'-O-methyl modified nucleotide
  modified_base 89: mod_base = OTHER; note = 2'-O-methyl modified nucleotide
  modified_base 90: mod_base = OTHER; note = 2'-O-methyl modified nucleotide
  modified_base 91: mod_base = OTHER; note = 2'-O-methyl modified nucleotide
  modified_base 92: mod_base = OTHER; note = 2'-O-methyl modified nucleotide
  modified_base 93: mod_base = OTHER; note = 2'-O-methyl modified nucleotide
  modified_base 94: mod_base = OTHER; note = 2'-O-methyl modified nucleotide
  modified_base 95: mod_base = OTHER; note = 2'-O-methyl modified nucleotide
  modified_base 96: mod_base = OTHER; note = 2'-O-methyl modified nucleotide
  modified_base 97: mod_base = OTHER; note = 2'-O-methyl modified nucleotide with phosphorothioate linkage
  modified_base 98: mod_base = OTHER; note = 2'-O-methyl modified nucleotide with phosphorothioate linkage
  modified_base 99: mod_base = OTHER; note = 2'-O-methyl modified nucleotide with phosphorothioate linkage
  modified_base 100: mod_base = OTHER; note = 2'-O-methyl modified nucleotide
  misc_difference 97..100: note = This region may encompass 0-4 nucleotides

SEQ ID NO: 2350 - RNA, 100 nt, synthetic construct; identical to SEQ ID NO: 1350
  source 1..100: mol_type = other RNA
  modified_base 1: mod_base = OTHER; note = 2'-O-methyl modified nucleotide with phosphorothioate linkage
  modified_base 2: mod_base = OTHER; note = 2'-O-methyl modified nucleotide with phosphorothioate linkage
  modified_base 3: mod_base = OTHER; note = 2'-O-methyl modified nucleotide with phosphorothioate linkage
  modified_base 29: mod_base = OTHER; note = 2'-O-methyl modified nucleotide
  modified_base 30: mod_base = OTHER; note = 2'-O-methyl modified nucleotide
  modified_base 31: mod_base = OTHER; note = 2'-O-methyl modified nucleotide
  modified_base 32: mod_base = OTHER; note = 2'-O-methyl modified nucleotide
  modified_base 33: mod_base = OTHER; note = 2'-O-methyl modified nucleotide
  modified_base 34: mod_base = OTHER; note = 2'-O-methyl modified nucleotide
  modified_base 35: mod_base = OTHER; note = 2'-O-methyl modified nucleotide
  modified_base 36: mod_base = OTHER; note = 2'-O-methyl modified nucleotide
  modified_base 37: mod_base = OTHER; note = 2'-O-methyl modified nucleotide
  modified_base 38: mod_base = OTHER; note = 2'-O-methyl modified nucleotide
  modified_base 39: mod_base = OTHER; note = 2'-O-methyl modified nucleotide
  modified_base 40: mod_base = OTHER; note = 2'-O-methyl modified nucleotide
  modified_base 69: mod_base = OTHER; note = 2'-O-methyl modified nucleotide
  modified_base 70: mod_base = OTHER; note = 2'-O-methyl modified nucleotide
  modified_base 71: mod_base = OTHER; note = 2'-O-methyl modified nucleotide
  modified_base 72: mod_base = OTHER; note = 2'-O-methyl modified nucleotide
  modified_base 73: mod_base = OTHER; note = 2'-O-methyl modified nucleotide
  modified_base 74: mod_base = OTHER; note = 2'-O-methyl modified nucleotide
  modified_base 75: mod_base = OTHER; note = 2'-O-methyl modified nucleotide
  modified_base 76: mod_base = OTHER; note = 2'-O-methyl modified nucleotide
  modified_base 77: mod_base = OTHER; note = 2'-O-methyl modified nucleotide
  modified_base 78: mod_base = OTHER; note = 2'-O-methyl modified nucleotide
  modified_base 79: mod_base = OTHER; note = 2'-O-methyl modified nucleotide
  modified_base 80: mod_base = OTHER; note = 2'-O-methyl modified nucleotide
  modified_base 81: mod_base = OTHER; note = 2'-O-methyl modified nucleotide
  modified_base 82: mod_base = OTHER; note = 2'-O-methyl modified nucleotide
  modified_base 83: mod_base = OTHER; note = 2'-O-methyl modified nucleotide
  modified_base 84: mod_base = OTHER; note = 2'-O-methyl modified nucleotide
  modified_base 85: mod_base = OTHER; note = 2'-O-methyl modified nucleotide
  modified_base 86: mod_base = OTHER; note = 2'-O-methyl modified nucleotide
  modified_base 87: mod_base = OTHER; note = 2'-O-methyl modified nucleotide
  modified_base 88: mod_base = OTHER; note = 2'-O-methyl modified nucleotide
  modified_base 89: mod_base = OTHER; note = 2'-O-methyl modified nucleotide
  modified_base 90: mod_base = OTHER; note = 2'-O-methyl modified nucleotide
  modified_base 91: mod_base = OTHER; note = 2'-O-methyl modified nucleotide
  modified_base 92: mod_base = OTHER; note = 2'-O-methyl modified nucleotide
  modified_base 93: mod_base = OTHER; note = 2'-O-methyl modified nucleotide
  modified_base 94: mod_base = OTHER; note = 2'-O-methyl modified nucleotide
  modified_base 95: mod_base = OTHER; note = 2'-O-methyl modified nucleotide
  modified_base 96: mod_base = OTHER; note = 2'-O-methyl modified nucleotide
  modified_base 97: mod_base = OTHER; note = 2'-O-methyl modified nucleotide with phosphorothioate linkage
  modified_base 98: mod_base = OTHER; note = 2'-O-methyl modified nucleotide with phosphorothioate linkage
  modified_base 99: mod_base = OTHER; note = 2'-O-methyl modified nucleotide with phosphorothioate linkage
  modified_base 100: mod_base = OTHER; note = 2'-O-methyl modified nucleotide
  misc_difference 97..100: note = This region may encompass 0-4 nucleotides

SEQ ID NO: 2351 - RNA, 100 nt, synthetic construct; identical to SEQ ID NO: 1351
  source 1..100: mol_type = other RNA
  modified_base 1: mod_base = OTHER; note = 2'-O-methyl modified nucleotide with phosphorothioate linkage
  modified_base 2: mod_base = OTHER; note = 2'-O-methyl modified nucleotide with phosphorothioate linkage
  modified_base 3: mod_base = OTHER; note = 2'-O-methyl modified nucleotide with phosphorothioate linkage
  modified_base 29: mod_base = OTHER; note = 2'-O-methyl modified nucleotide
  modified_base 30: mod_base = OTHER; note = 2'-O-methyl modified nucleotide
  modified_base 31: mod_base = OTHER; note = 2'-O-methyl modified nucleotide
  modified_base 32: mod_base = OTHER; note = 2'-O-methyl modified nucleotide
  modified_base 33: mod_base = OTHER; note = 2'-O-methyl modified nucleotide
  modified_base 34: mod_base = OTHER; note = 2'-O-methyl modified nucleotide
  modified_base 35: mod_base = OTHER; note = 2'-O-methyl modified nucleotide
  modified_base 36: mod_base = OTHER; note = 2'-O-methyl modified nucleotide
  modified_base 37: mod_base = OTHER; note = 2'-O-methyl modified nucleotide
  modified_base 38: mod_base = OTHER; note = 2'-O-methyl modified nucleotide
  modified_base 39: mod_base = OTHER; note = 2'-O-methyl modified nucleotide
  modified_base 40: mod_base = OTHER; note = 2'-O-methyl modified nucleotide
  modified_base 69: mod_base = OTHER; note = 2'-O-methyl modified nucleotide
  modified_base 70: mod_base = OTHER; note = 2'-O-methyl modified nucleotide
  modified_base 71: mod_base = OTHER; note = 2'-O-methyl modified nucleotide
  modified_base 72: mod_base = OTHER; note = 2'-O-methyl modified nucleotide
  modified_base 73: mod_base = OTHER; note = 2'-O-methyl modified nucleotide
  modified_base 74: mod_base = OTHER; note = 2'-O-methyl modified nucleotide
  modified_base 75: mod_base = OTHER; note = 2'-O-methyl modified nucleotide
  modified_base 76: mod_base = OTHER; note = 2'-O-methyl modified nucleotide
  modified_base 77: mod_base = OTHER; note = 2'-O-methyl modified nucleotide
  modified_base 78: mod_base = OTHER; note = 2'-O-methyl modified nucleotide
  modified_base 79: mod_base = OTHER; note = 2'-O-methyl modified nucleotide
  modified_base 80: mod_base = OTHER; note = 2'-O-methyl modified nucleotide
  modified_base 81: mod_base = OTHER; note = 2'-O-methyl modified nucleotide
  modified_base 82: mod_base = OTHER; note = 2'-O-methyl modified nucleotide
  modified_base 83: mod_base = OTHER; note = 2'-O-methyl modified nucleotide
  modified_base 84: mod_base = OTHER; note = 2'-O-methyl modified nucleotide
  modified_base 85: mod_base = OTHER; note = 2'-O-methyl modified nucleotide
  modified_base 86: mod_base = OTHER; note = 2'-O-methyl modified nucleotide
  modified_base 87: mod_base = OTHER; note = 2'-O-methyl modified nucleotide
  modified_base 88: mod_base = OTHER; note = 2'-O-methyl modified nucleotide
  modified_base 89: mod_base = OTHER; note = 2'-O-methyl modified nucleotide
  modified_base 90: mod_base = OTHER; note = 2'-O-methyl modified nucleotide
  modified_base 91: mod_base = OTHER; note = 2'-O-methyl modified nucleotide
  modified_base 92: mod_base = OTHER; note = 2'-O-methyl modified nucleotide
  modified_base 93: mod_base = OTHER; note = 2'-O-methyl modified nucleotide
  modified_base 94: mod_base = OTHER; note = 2'-O-methyl modified nucleotide
  modified_base 95: mod_base = OTHER; note = 2'-O-methyl modified nucleotide
  modified_base 96: mod_base = OTHER; note = 2'-O-methyl modified nucleotide
  modified_base 97: mod_base = OTHER; note = 2'-O-methyl modified nucleotide with phosphorothioate linkage
  modified_base 98: mod_base = OTHER; note = 2'-O-methyl modified nucleotide with phosphorothioate linkage
  modified_base 99: mod_base = OTHER; note = 2'-O-methyl modified nucleotide with phosphorothioate linkage
  modified_base 100: mod_base = OTHER; note = 2'-O-methyl modified nucleotide
  misc_difference 97..100: note = This region may encompass 0-4 nucleotides

SEQ ID NO: 2352 - RNA, 100 nt, synthetic construct; identical to SEQ ID NO: 1352
  source 1..100: mol_type = other RNA
  modified_base 1: mod_base = OTHER; note = 2'-O-methyl modified nucleotide with phosphorothioate linkage
  modified_base 2: mod_base = OTHER; note = 2'-O-methyl modified nucleotide with phosphorothioate linkage
  modified_base 3: mod_base = OTHER; note = 2'-O-methyl modified nucleotide with phosphorothioate linkage
  modified_base 29: mod_base = OTHER; note = 2'-O-methyl modified nucleotide
  modified_base 30: mod_base = OTHER; note = 2'-O-methyl modified nucleotide
  modified_base 31: mod_base = OTHER; note = 2'-O-methyl modified nucleotide
  modified_base 32: mod_base = OTHER; note = 2'-O-methyl modified nucleotide
  modified_base 33: mod_base = OTHER; note = 2'-O-methyl modified nucleotide
  modified_base 34: mod_base = OTHER; note = 2'-O-methyl modified nucleotide
  modified_base 35: mod_base = OTHER; note = 2'-O-methyl modified nucleotide
  modified_base 36: mod_base = OTHER; note = 2'-O-methyl modified nucleotide
  modified_base 37: mod_base = OTHER; note = 2'-O-methyl modified nucleotide
  modified_base 38: mod_base = OTHER; note = 2'-O-methyl modified nucleotide
  modified_base 39: mod_base = OTHER; note = 2'-O-methyl modified nucleotide
  modified_base 40: mod_base = OTHER; note = 2'-O-methyl modified nucleotide
  modified_base 69: mod_base = OTHER; note = 2'-O-methyl modified nucleotide
  modified_base 70: mod_base = OTHER; note = 2'-O-methyl modified nucleotide
  modified_base 71: mod_base = OTHER; note = 2'-O-methyl modified nucleotide
  modified_base 72: mod_base = OTHER; note = 2'-O-methyl modified nucleotide
  modified_base 73: mod_base = OTHER; note = 2'-O-methyl modified nucleotide
  modified_base 74: mod_base = OTHER; note = 2'-O-methyl modified nucleotide
  modified_base 75: mod_base = OTHER; note = 2'-O-methyl modified nucleotide
  modified_base 76: mod_base = OTHER; note = 2'-O-methyl modified nucleotide
  modified_base 77: mod_base = OTHER; note = 2'-O-methyl modified nucleotide
  modified_base 78: mod_base = OTHER; note = 2'-O-methyl modified nucleotide
  modified_base 79: mod_base = OTHER; note = 2'-O-methyl modified nucleotide
  modified_base 80: mod_base = OTHER; note = 2'-O-methyl modified nucleotide
  modified_base 81: mod_base = OTHER; note = 2'-O-methyl modified nucleotide
  modified_base 82: mod_base = OTHER; note = 2'-O-methyl modified nucleotide
  modified_base 83: mod_base = OTHER; note = 2'-O-methyl modified nucleotide
  modified_base 84: mod_base = OTHER; note = 2'-O-methyl modified nucleotide
  modified_base 85: mod_base = OTHER; note = 2'-O-methyl modified nucleotide
  modified_base 86: mod_base = OTHER; note = 2'-O-methyl modified nucleotide
  modified_base 87: mod_base = OTHER; note = 2'-O-methyl modified nucleotide
  modified_base 88: mod_base = OTHER; note = 2'-O-methyl modified nucleotide
  modified_base 89: mod_base = OTHER; note = 2'-O-methyl modified nucleotide
  modified_base 90: mod_base = OTHER; note = 2'-O-methyl modified nucleotide
  modified_base 91: mod_base = OTHER; note = 2'-O-methyl modified nucleotide
  modified_base 92: mod_base = OTHER; note = 2'-O-methyl modified nucleotide
  modified_base 93: mod_base = OTHER; note = 2'-O-methyl modified nucleotide
  modified_base 94: mod_base = OTHER; note = 2'-O-methyl modified nucleotide
  modified_base 95: mod_base = OTHER; note = 2'-O-methyl modified nucleotide
  modified_base 96: mod_base = OTHER; note = 2'-O-methyl modified nucleotide
  modified_base 97: mod_base = OTHER; note = 2'-O-methyl modified nucleotide with phosphorothioate linkage
  modified_base 98: mod_base = OTHER; note = 2'-O-methyl modified nucleotide with phosphorothioate linkage
  modified_base 99: mod_base = OTHER; note = 2'-O-methyl modified nucleotide with phosphorothioate linkage
  modified_base 100: mod_base = OTHER; note = 2'-O-methyl modified nucleotide
  misc_difference 97..100: note = This region may encompass 0-4 nucleotides

SEQ ID NO: 2353 - RNA, 100 nt, synthetic construct; identical to SEQ ID NO: 1353
  source 1..100: mol_type = other RNA
  modified_base 1: mod_base = OTHER; note = 2'-O-methyl modified nucleotide with phosphorothioate linkage
  modified_base 2: mod_base = OTHER; note = 2'-O-methyl modified nucleotide with phosphorothioate linkage
  modified_base 3: mod_base = OTHER; note = 2'-O-methyl modified nucleotide with phosphorothioate linkage
  modified_base 29: mod_base = OTHER; note = 2'-O-methyl modified nucleotide
  modified_base 30: mod_base = OTHER; note = 2'-O-methyl modified nucleotide
  modified_base 31: mod_base = OTHER; note = 2'-O-methyl modified nucleotide
  modified_base 32: mod_base = OTHER; note = 2'-O-methyl modified nucleotide
  modified_base 33: mod_base = OTHER; note = 2'-O-methyl modified nucleotide
  modified_base 34: mod_base = OTHER; note = 2'-O-methyl modified nucleotide
  modified_base 35: mod_base = OTHER; note = 2'-O-methyl modified nucleotide
  modified_base 36: mod_base = OTHER; note = 2'-O-methyl modified nucleotide
  modified_base 37: mod_base = OTHER; note = 2'-O-methyl modified nucleotide
  modified_base 38: mod_base = OTHER; note = 2'-O-methyl modified nucleotide
  modified_base 39: mod_base = OTHER; note = 2'-O-methyl modified nucleotide
  modified_base 40: mod_base = OTHER; note = 2'-O-methyl modified nucleotide
  modified_base 69: mod_base = OTHER; note = 2'-O-methyl modified nucleotide
  modified_base 70: mod_base = OTHER; note = 2'-O-methyl modified nucleotide
  modified_base 71: mod_base = OTHER; note = 2'-O-methyl modified nucleotide
  modified_base 72: mod_base = OTHER; note = 2'-O-methyl modified nucleotide
  modified_base 73: mod_base = OTHER; note = 2'-O-methyl modified nucleotide
  modified_base 74: mod_base = OTHER; note = 2'-O-methyl modified nucleotide
  modified_base 75: mod_base = OTHER; note = 2'-O-methyl modified nucleotide
  modified_base 76: mod_base = OTHER; note = 2'-O-methyl modified nucleotide
  modified_base 77: mod_base = OTHER; note = 2'-O-methyl modified nucleotide
  modified_base 78: mod_base = OTHER; note = 2'-O-methyl modified nucleotide
  modified_base 79: mod_base = OTHER; note = 2'-O-methyl modified nucleotide
  modified_base 80: mod_base = OTHER; note = 2'-O-methyl modified nucleotide
  modified_base 81: mod_base = OTHER; note = 2'-O-methyl modified nucleotide
  modified_base 82: mod_base = OTHER; note = 2'-O-methyl modified nucleotide
  modified_base 83: mod_base = OTHER; note = 2'-O-methyl modified nucleotide
  modified_base 84: mod_base = OTHER; note = 2'-O-methyl modified nucleotide
  modified_base 85: mod_base = OTHER; note = 2'-O-methyl modified nucleotide
  modified_base 86: mod_base = OTHER; note = 2'-O-methyl modified nucleotide
  modified_base 87: mod_base = OTHER; note = 2'-O-methyl modified nucleotide
  modified_base 88: mod_base = OTHER; note = 2'-O-methyl modified nucleotide
  modified_base 89: mod_base = OTHER; note = 2'-O-methyl modified nucleotide
  modified_base 90: mod_base = OTHER; note = 2'-O-methyl modified nucleotide
  modified_base 91: mod_base = OTHER; note = 2'-O-methyl modified nucleotide
  modified_base 92: mod_base = OTHER; note = 2'-O-methyl modified nucleotide
  modified_base 93: mod_base = OTHER; note = 2'-O-methyl modified nucleotide
  modified_base 94: mod_base = OTHER; note = 2'-O-methyl modified nucleotide
  modified_base 95: mod_base = OTHER; note = 2'-O-methyl modified nucleotide
  modified_base 96: mod_base = OTHER; note = 2'-O-methyl modified nucleotide
  modified_base 97: mod_base = OTHER; note = 2'-O-methyl modified nucleotide with phosphorothioate linkage
  modified_base 98: mod_base = OTHER; note = 2'-O-methyl modified nucleotide with phosphorothioate linkage
  modified_base 99: mod_base = OTHER; note = 2'-O-methyl modified nucleotide with phosphorothioate linkage
  modified_base 100: mod_base = OTHER; note = 2'-O-methyl modified nucleotide
  misc_difference 97..100: note = This region may encompass 0-4 nucleotides

SEQ ID NO: 2354 - RNA, 100 nt, synthetic construct; identical to SEQ ID NO: 1354
  source 1..100: mol_type = other RNA
  modified_base 1: mod_base = OTHER; note = 2'-O-methyl modified nucleotide with phosphorothioate linkage
  modified_base 2: mod_base = OTHER; note = 2'-O-methyl modified nucleotide with phosphorothioate linkage
  modified_base 3: mod_base = OTHER; note = 2'-O-methyl modified nucleotide with phosphorothioate linkage
  modified_base 29: mod_base = OTHER; note = 2'-O-methyl modified nucleotide
  modified_base 30: mod_base = OTHER; note = 2'-O-methyl modified nucleotide
  modified_base 31: mod_base = OTHER; note = 2'-O-methyl modified nucleotide
  modified_base 32: mod_base = OTHER; note = 2'-O-methyl modified nucleotide
  modified_base 33: mod_base = OTHER; note = 2'-O-methyl modified nucleotide
  modified_base 34: mod_base = OTHER; note = 2'-O-methyl modified nucleotide
  modified_base 35: mod_base = OTHER; note = 2'-O-methyl modified nucleotide
  modified_base 36: mod_base = OTHER; note = 2'-O-methyl modified nucleotide
  modified_base 37: mod_base = OTHER; note = 2'-O-methyl modified nucleotide
  modified_base 38: mod_base = OTHER; note = 2'-O-methyl modified nucleotide
  modified_base 39: mod_base = OTHER; note = 2'-O-methyl modified nucleotide
  modified_base 40: mod_base = OTHER; note = 2'-O-methyl modified nucleotide
  modified_base 69: mod_base = OTHER; note = 2'-O-methyl modified nucleotide
  modified_base 70: mod_base = OTHER; note = 2'-O-methyl modified nucleotide
  modified_base 71: mod_base = OTHER; note = 2'-O-methyl modified nucleotide
  modified_base 72: mod_base = OTHER; note = 2'-O-methyl modified nucleotide
  modified_base 73: mod_base = OTHER; note = 2'-O-methyl modified nucleotide
  modified_base 74: mod_base = OTHER; note = 2'-O-methyl modified nucleotide
  modified_base 75: mod_base = OTHER; note = 2'-O-methyl modified nucleotide
  modified_base 76: mod_base = OTHER; note = 2'-O-methyl modified nucleotide
  modified_base 77: mod_base = OTHER; note = 2'-O-methyl modified nucleotide
  modified_base 78: mod_base = OTHER; note = 2'-O-methyl modified nucleotide
  modified_base 79: mod_base = OTHER; note = 2'-O-methyl modified nucleotide
  modified_base 80: mod_base = OTHER; note = 2'-O-methyl modified nucleotide
  modified_base 81: mod_base = OTHER; note = 2'-O-methyl modified nucleotide
  modified_base 82: mod_base = OTHER; note = 2'-O-methyl modified nucleotide
  modified_base 83: mod_base = OTHER; note = 2'-O-methyl modified nucleotide
  modified_base 84: mod_base = OTHER; note = 2'-O-methyl modified nucleotide
  modified_base 85: mod_base = OTHER; note = 2'-O-methyl modified nucleotide
  modified_base 86: mod_base = OTHER; note = 2'-O-methyl modified nucleotide
  modified_base 87: mod_base = OTHER; note = 2'-O-methyl modified nucleotide
  modified_base 88: mod_base = OTHER; note = 2'-O-methyl modified nucleotide
  modified_base 89: mod_base = OTHER; note = 2'-O-methyl modified nucleotide
  modified_base 90: mod_base = OTHER; note = 2'-O-methyl modified nucleotide
  modified_base 91: mod_base = OTHER; note = 2'-O-methyl modified nucleotide
  modified_base 92: mod_base = OTHER; note = 2'-O-methyl modified nucleotide
  modified_base 93: mod_base = OTHER; note = 2'-O-methyl modified nucleotide
  modified_base 94: mod_base = OTHER; note = 2'-O-methyl modified nucleotide
  modified_base 95: mod_base = OTHER; note = 2'-O-methyl modified nucleotide
  modified_base 96: mod_base = OTHER; note = 2'-O-methyl modified nucleotide
  modified_base 97: mod_base = OTHER; note = 2'-O-methyl modified nucleotide with phosphorothioate linkage
  modified_base 98: mod_base = OTHER; note = 2'-O-methyl modified nucleotide with phosphorothioate linkage
  modified_base 99: mod_base = OTHER; note = 2'-O-methyl modified nucleotide with phosphorothioate linkage
  modified_base 100: mod_base = OTHER; note = 2'-O-methyl modified nucleotide
  misc_difference 97..100: note = This region may encompass 0-4 nucleotides

SEQ ID NO: 2355 - RNA, 100 nt, synthetic construct; identical to SEQ ID NO: 1355
  source 1..100: mol_type = other RNA
  modified_base 1: mod_base = OTHER; note = 2'-O-methyl modified nucleotide with phosphorothioate linkage
  modified_base 2: mod_base = OTHER; note = 2'-O-methyl modified nucleotide with phosphorothioate linkage
  modified_base 3: mod_base = OTHER; note = 2'-O-methyl modified nucleotide with phosphorothioate linkage
  modified_base 29: mod_base = OTHER; note = 2'-O-methyl modified nucleotide
  modified_base 30: mod_base = OTHER; note = 2'-O-methyl modified nucleotide
  modified_base 31: mod_base = OTHER; note = 2'-O-methyl modified nucleotide
  modified_base 32: mod_base = OTHER; note = 2'-O-methyl modified nucleotide
  modified_base 33: mod_base = OTHER; note = 2'-O-methyl modified nucleotide
  modified_base 34: mod_base = OTHER; note = 2'-O-methyl modified nucleotide
  modified_base 35: mod_base = OTHER; note = 2'-O-methyl modified nucleotide
  modified_base 36: mod_base = OTHER; note = 2'-O-methyl modified nucleotide
  modified_base 37: mod_base = OTHER; note = 2'-O-methyl modified nucleotide
  modified_base 38: mod_base = OTHER; note = 2'-O-methyl modified nucleotide
  modified_base 39: mod_base = OTHER; note = 2'-O-methyl modified nucleotide
  modified_base 40: mod_base = OTHER; note = 2'-O-methyl modified nucleotide
  modified_base 69: mod_base = OTHER; note = 2'-O-methyl modified nucleotide
  modified_base 70: mod_base = OTHER; note = 2'-O-methyl modified nucleotide
  modified_base 71: mod_base = OTHER; note = 2'-O-methyl modified nucleotide
  modified_base 72: mod_base = OTHER; note = 2'-O-methyl modified nucleotide
  modified_base 73: mod_base = OTHER; note = 2'-O-methyl modified nucleotide
  modified_base 74: mod_base = OTHER; note = 2'-O-methyl modified nucleotide
  modified_base 75: mod_base = OTHER; note = 2'-O-methyl modified nucleotide
  modified_base 76: mod_base = OTHER; note = 2'-O-methyl modified nucleotide
  modified_base 77: mod_base = OTHER; note = 2'-O-methyl modified nucleotide
  modified_base 78: mod_base = OTHER; note = 2'-O-methyl modified nucleotide
  modified_base 79: mod_base = OTHER; note = 2'-O-methyl modified nucleotide
  modified_base 80: mod_base = OTHER; note = 2'-O-methyl modified nucleotide
  modified_base 81: mod_base = OTHER; note = 2'-O-methyl modified nucleotide
  modified_base 82: mod_base = OTHER; note = 2'-O-methyl modified nucleotide
  modified_base 83: mod_base = OTHER; note = 2'-O-methyl modified nucleotide
  modified_base 84: mod_base = OTHER; note = 2'-O-methyl modified nucleotide
  modified_base 85: mod_base = OTHER; note = 2'-O-methyl modified nucleotide
  modified_base 86: mod_base = OTHER; note = 2'-O-methyl modified nucleotide
  modified_base 87: mod_base = OTHER; note = 2'-O-methyl modified nucleotide
  modified_base 88: mod_base = OTHER; note = 2'-O-methyl modified nucleotide
  modified_base 89: mod_base = OTHER; note = 2'-O-methyl modified nucleotide
  modified_base 90: mod_base = OTHER; note = 2'-O-methyl modified nucleotide
  modified_base 91: mod_base = OTHER; note = 2'-O-methyl modified nucleotide
  modified_base 92: mod_base = OTHER; note = 2'-O-methyl modified nucleotide
  modified_base 93: mod_base = OTHER; note = 2'-O-methyl modified nucleotide
  modified_base 94: mod_base = OTHER; note = 2'-O-methyl modified nucleotide
  modified_base 95: mod_base = OTHER; note = 2'-O-methyl modified nucleotide
  modified_base 96: mod_base = OTHER; note = 2'-O-methyl modified nucleotide
  modified_base 97: mod_base = OTHER; note = 2'-O-methyl modified nucleotide with phosphorothioate linkage
  modified_base 98: mod_base = OTHER; note = 2'-O-methyl modified nucleotide with phosphorothioate linkage
  modified_base 99: mod_base = OTHER; note = 2'-O-methyl modified nucleotide with phosphorothioate linkage
  modified_base 100: mod_base = OTHER; note = 2'-O-methyl modified nucleotide
  misc_difference 97..100: note = This region may encompass 0-4 nucleotides

SEQ ID NO: 2356 - RNA, 100 nt, synthetic construct; identical to SEQ ID NO: 1356
  source 1..100: mol_type = other RNA
  modified_base 1: mod_base = OTHER; note = 2'-O-methyl modified nucleotide with phosphorothioate linkage
  modified_base 2: mod_base = OTHER; note = 2'-O-methyl modified nucleotide with phosphorothioate linkage
  modified_base 3: mod_base = OTHER; note = 2'-O-methyl modified nucleotide with phosphorothioate linkage
  modified_base 29: mod_base = OTHER; note = 2'-O-methyl modified nucleotide
  modified_base 30: mod_base = OTHER; note = 2'-O-methyl modified nucleotide
  modified_base 31: mod_base = OTHER; note = 2'-O-methyl modified nucleotide
  modified_base 32: mod_base = OTHER; note = 2'-O-methyl modified nucleotide
  modified_base 33: mod_base = OTHER; note = 2'-O-methyl modified nucleotide
  modified_base 34: mod_base = OTHER; note = 2'-O-methyl modified nucleotide
  modified_base 35: mod_base = OTHER; note = 2'-O-methyl modified nucleotide
  modified_base 36: mod_base = OTHER; note = 2'-O-methyl modified nucleotide
  modified_base 37: mod_base = OTHER; note = 2'-O-methyl modified nucleotide
  modified_base 38: mod_base = OTHER; note = 2'-O-methyl modified nucleotide
  modified_base 39: mod_base = OTHER; note = 2'-O-methyl modified nucleotide
  modified_base 40: mod_base = OTHER; note = 2'-O-methyl modified nucleotide
  modified_base 69: mod_base = OTHER; note = 2'-O-methyl modified nucleotide
  modified_base 70: mod_base = OTHER; note = 2'-O-methyl modified nucleotide
  modified_base 71: mod_base = OTHER; note = 2'-O-methyl modified nucleotide
  modified_base 72: mod_base = OTHER; note = 2'-O-methyl modified nucleotide
  modified_base 73: mod_base = OTHER; note = 2'-O-methyl modified nucleotide
  modified_base 74: mod_base = OTHER; note = 2'-O-methyl modified nucleotide
  modified_base 75: mod_base = OTHER; note = 2'-O-methyl modified nucleotide
  modified_base 76: mod_base = OTHER; note = 2'-O-methyl modified nucleotide
  modified_base 77: mod_base = OTHER; note = 2'-O-methyl modified nucleotide
  modified_base 78: mod_base = OTHER; note = 2'-O-methyl modified nucleotide
  modified_base 79: mod_base = OTHER; note = 2'-O-methyl modified nucleotide
  modified_base 80: mod_base = OTHER; note = 2'-O-methyl modified nucleotide
  modified_base 81: mod_base = OTHER; note = 2'-O-methyl modified nucleotide
  modified_base 82: mod_base = OTHER; note = 2'-O-methyl modified nucleotide
  modified_base 83: mod_base = OTHER; note = 2'-O-methyl modified nucleotide
  modified_base 84: mod_base = OTHER; note = 2'-O-methyl modified nucleotide
  modified_base 85: mod_base = OTHER; note = 2'-O-methyl modified nucleotide
  modified_base 86: mod_base = OTHER; note = 2'-O-methyl modified nucleotide
  modified_base 87: mod_base = OTHER; note = 2'-O-methyl modified nucleotide
  modified_base 88: mod_base = OTHER; note = 2'-O-methyl modified nucleotide
  modified_base 89: mod_base = OTHER; note = 2'-O-methyl modified nucleotide
  modified_base 90: mod_base = OTHER; note = 2'-O-methyl modified nucleotide
  modified_base 91: mod_base = OTHER; note = 2'-O-methyl modified nucleotide
  modified_base 92: mod_base = OTHER; note = 2'-O-methyl modified nucleotide
  modified_base 93: mod_base = OTHER; note = 2'-O-methyl modified nucleotide
  modified_base 94: mod_base = OTHER; note = 2'-O-methyl modified nucleotide
  modified_base 95: mod_base = OTHER; note = 2'-O-methyl modified nucleotide
  modified_base 96: mod_base = OTHER; note = 2'-O-methyl modified nucleotide
  modified_base 97: mod_base = OTHER; note = 2'-O-methyl modified nucleotide with phosphorothioate linkage
  modified_base 98: mod_base = OTHER; note = 2'-O-methyl modified nucleotide with phosphorothioate linkage
  modified_base 99: mod_base = OTHER; note = 2'-O-methyl modified nucleotide with phosphorothioate linkage
  modified_base 100: mod_base = OTHER; note = 2'-O-methyl modified nucleotide
  misc_difference 97..100: note = This region may encompass 0-4 nucleotides

SEQ ID NO: 2357 - RNA, 100 nt, synthetic construct; identical to SEQ ID NO: 1357
  source 1..100: mol_type = other RNA
  modified_base 1: mod_base = OTHER; note = 2'-O-methyl modified nucleotide with phosphorothioate linkage
  modified_base 2: mod_base = OTHER; note = 2'-O-methyl modified nucleotide with phosphorothioate linkage
  modified_base 3: mod_base = OTHER; note = 2'-O-methyl modified nucleotide with phosphorothioate linkage
  modified_base 29: mod_base = OTHER; note = 2'-O-methyl modified nucleotide
  modified_base 30: mod_base = OTHER; note = 2'-O-methyl modified nucleotide
  modified_base 31: mod_base = OTHER; note = 2'-O-methyl modified nucleotide
  modified_base 32: mod_base = OTHER; note = 2'-O-methyl modified nucleotide
  modified_base 33: mod_base = OTHER; note = 2'-O-methyl modified nucleotide
  modified_base 34: mod_base = OTHER; note = 2'-O-methyl modified nucleotide
  modified_base 35: mod_base = OTHER; note = 2'-O-methyl modified nucleotide
  modified_base 36: mod_base = OTHER; note = 2'-O-methyl modified nucleotide
  modified_base 37: mod_base = OTHER; note = 2'-O-methyl modified nucleotide
  modified_base 38: mod_base = OTHER; note = 2'-O-methyl modified nucleotide
  modified_base 39: mod_base = OTHER; note = 2'-O-methyl modified nucleotide
  modified_base 40: mod_base = OTHER; note = 2'-O-methyl modified nucleotide
  modified_base 69: mod_base = OTHER; note = 2'-O-methyl modified nucleotide
  modified_base 70: mod_base = OTHER; note = 2'-O-methyl modified nucleotide
  modified_base 71: mod_base = OTHER; note = 2'-O-methyl modified nucleotide
  modified_base 72: mod_base = OTHER; note = 2'-O-methyl modified nucleotide
  modified_base 73: mod_base = OTHER; note = 2'-O-methyl modified nucleotide
  modified_base 74: mod_base = OTHER; note = 2'-O-methyl modified nucleotide
  modified_base 75: mod_base = OTHER; note = 2'-O-methyl modified nucleotide
  modified_base 76: mod_base = OTHER; note = 2'-O-methyl modified nucleotide
  modified_base 77: mod_base = OTHER; note = 2'-O-methyl modified nucleotide
  modified_base 78: mod_base = OTHER; note = 2'-O-methyl modified nucleotide
  modified_base 79: mod_base = OTHER; note = 2'-O-methyl modified nucleotide
  modified_base 80: mod_base = OTHER; note = 2'-O-methyl modified nucleotide
  modified_base 81: mod_base = OTHER; note = 2'-O-methyl modified nucleotide
  modified_base 82: mod_base = OTHER; note = 2'-O-methyl modified nucleotide
  modified_base 83: mod_base = OTHER; note = 2'-O-methyl modified nucleotide
  modified_base 84: mod_base = OTHER; note = 2'-O-methyl modified nucleotide
  modified_base 85: mod_base = OTHER; note = 2'-O-methyl modified nucleotide
  modified_base 86: mod_base = OTHER; note = 2'-O-methyl modified nucleotide
  modified_base 87: mod_base = OTHER; note = 2'-O-methyl modified nucleotide
  modified_base 88: mod_base = OTHER; note = 2'-O-methyl modified nucleotide
  modified_base 89: mod_base = OTHER; note = 2'-O-methyl modified nucleotide
  modified_base 90: mod_base = OTHER; note = 2'-O-methyl modified nucleotide
  modified_base 91: mod_base = OTHER; note = 2'-O-methyl modified nucleotide
  modified_base 92: mod_base = OTHER; note = 2'-O-methyl modified nucleotide
  modified_base 93: mod_base = OTHER; note = 2'-O-methyl modified nucleotide
  modified_base 94: mod_base = OTHER; note = 2'-O-methyl modified nucleotide
  modified_base 95: mod_base = OTHER; note = 2'-O-methyl modified nucleotide
  modified_base 96: mod_base = OTHER; note = 2'-O-methyl modified nucleotide
  modified_base 97: mod_base = OTHER; note = 2'-O-methyl modified nucleotide with phosphorothioate linkage
  modified_base 98: mod_base = OTHER; note = 2'-O-methyl modified nucleotide with phosphorothioate linkage
  modified_base 99: mod_base = OTHER; note = 2'-O-methyl modified nucleotide with phosphorothioate linkage
  modified_base 100: mod_base = OTHER; note = 2'-O-methyl modified nucleotide
  misc_difference 97..100: note = This region may encompass 0-4 nucleotides

SEQ ID NO: 2358 - RNA, 100 nt, synthetic construct; identical to SEQ ID NO: 1358
  source 1..100: mol_type = other RNA
  modified_base 1: mod_base = OTHER; note = 2'-O-methyl modified nucleotide with phosphorothioate linkage
  modified_base 2: mod_base = OTHER; note = 2'-O-methyl modified nucleotide with phosphorothioate linkage
  modified_base 3: mod_base = OTHER; note = 2'-O-methyl modified nucleotide with phosphorothioate linkage
  modified_base 29: mod_base = OTHER; note = 2'-O-methyl modified nucleotide
  modified_base 30: mod_base = OTHER; note = 2'-O-methyl modified nucleotide
  modified_base 31: mod_base = OTHER; note = 2'-O-methyl modified nucleotide
  modified_base 32: mod_base = OTHER; note = 2'-O-methyl modified nucleotide
  modified_base 33: mod_base = OTHER; note = 2'-O-methyl modified nucleotide
  modified_base 34: mod_base = OTHER; note = 2'-O-methyl modified nucleotide
  modified_base 35: mod_base = OTHER; note = 2'-O-methyl modified nucleotide
  modified_base 36: mod_base = OTHER; note = 2'-O-methyl modified nucleotide
  modified_base 37: mod_base = OTHER; note = 2'-O-methyl modified nucleotide
  modified_base 38: mod_base = OTHER; note = 2'-O-methyl modified nucleotide
  modified_base 39: mod_base = OTHER; note = 2'-O-methyl modified nucleotide
  modified_base 40: mod_base = OTHER; note = 2'-O-methyl modified nucleotide
  modified_base 69: mod_base = OTHER; note = 2'-O-methyl modified nucleotide
  modified_base 70: mod_base = OTHER; note = 2'-O-methyl modified nucleotide
  modified_base 71: mod_base = OTHER; note = 2'-O-methyl modified nucleotide
  modified_base 72: mod_base = OTHER; note = 2'-O-methyl modified nucleotide
  modified_base 73: mod_base = OTHER; note = 2'-O-methyl modified nucleotide
  modified_base 74: mod_base = OTHER; note = 2'-O-methyl modified nucleotide
  modified_base 75: mod_base = OTHER; note = 2'-O-methyl modified nucleotide
  modified_base 76: mod_base = OTHER; note = 2'-O-methyl modified nucleotide
  modified_base 77: mod_base = OTHER; note = 2'-O-methyl modified nucleotide
  modified_base 78: mod_base = OTHER; note = 2'-O-methyl modified nucleotide
  modified_base 79: mod_base = OTHER; note = 2'-O-methyl modified nucleotide
  modified_base 80: mod_base = OTHER; note = 2'-O-methyl modified nucleotide
  modified_base 81: mod_base = OTHER; note = 2'-O-methyl modified nucleotide
  modified_base 82: mod_base = OTHER; note = 2'-O-methyl modified nucleotide
  modified_base 83: mod_base = OTHER; note = 2'-O-methyl modified nucleotide
  modified_base 84: mod_base = OTHER; note = 2'-O-methyl modified nucleotide
  modified_base 85: mod_base = OTHER; note = 2'-O-methyl modified nucleotide
  modified_base 86: mod_base = OTHER; note = 2'-O-methyl modified nucleotide
  modified_base 87: mod_base = OTHER; note = 2'-O-methyl modified nucleotide
  modified_base 88: mod_base = OTHER; note = 2'-O-methyl modified nucleotide
  modified_base 89: mod_base = OTHER; note = 2'-O-methyl modified nucleotide
  modified_base 90: mod_base = OTHER; note = 2'-O-methyl modified nucleotide
  modified_base 91: mod_base = OTHER; note = 2'-O-methyl modified nucleotide
  modified_base 92: mod_base = OTHER; note = 2'-O-methyl modified nucleotide
  modified_base 93: mod_base = OTHER; note = 2'-O-methyl modified nucleotide
  modified_base 94: mod_base = OTHER; note = 2'-O-methyl modified nucleotide
  modified_base 95: mod_base = OTHER; note = 2'-O-methyl modified nucleotide
  modified_base 96: mod_base = OTHER; note = 2'-O-methyl modified nucleotide
  modified_base 97: mod_base = OTHER; note = 2'-O-methyl modified nucleotide with phosphorothioate linkage
  modified_base 98: mod_base = OTHER; note = 2'-O-methyl modified nucleotide with phosphorothioate linkage
  modified_base 99: mod_base = OTHER; note = 2'-O-methyl modified nucleotide with phosphorothioate linkage
  modified_base 100: mod_base = OTHER; note = 2'-O-methyl modified nucleotide
  misc_difference 97..100: note = This region may encompass 0-4 nucleotides

SEQ ID NO: 2359 - RNA, 100 nt, synthetic construct; identical to SEQ ID NO: 1359
  source 1..100: mol_type = other RNA
  modified_base 1: mod_base = OTHER; note = 2'-O-methyl modified nucleotide with phosphorothioate linkage
  modified_base 2: mod_base = OTHER; note = 2'-O-methyl modified nucleotide with phosphorothioate linkage
  modified_base 3: mod_base = OTHER; note = 2'-O-methyl modified nucleotide with phosphorothioate linkage
  modified_base 29: mod_base = OTHER; note = 2'-O-methyl modified nucleotide
  modified_base 30: mod_base = OTHER; note = 2'-O-methyl modified nucleotide
  modified_base 31: mod_base = OTHER; note = 2'-O-methyl modified nucleotide
  modified_base 32: mod_base = OTHER; note = 2'-O-methyl modified nucleotide
  modified_base 33: mod_base = OTHER; note = 2'-O-methyl modified nucleotide
  modified_base 34: mod_base = OTHER; note = 2'-O-methyl modified nucleotide
  modified_base 35: mod_base = OTHER; note = 2'-O-methyl modified nucleotide
  modified_base 36: mod_base = OTHER; note = 2'-O-methyl modified nucleotide
  modified_base 37: mod_base = OTHER; note = 2'-O-methyl modified nucleotide
  modified_base 38: mod_base = OTHER; note = 2'-O-methyl modified nucleotide
  modified_base 39: mod_base = OTHER; note = 2'-O-methyl modified nucleotide
  modified_base 40: mod_base = OTHER; note = 2'-O-methyl modified nucleotide
  modified_base 69: mod_base = OTHER; note = 2'-O-methyl modified nucleotide
  modified_base 70: mod_base = OTHER; note = 2'-O-methyl modified nucleotide
  modified_base 71: mod_base = OTHER; note = 2'-O-methyl modified nucleotide
  modified_base 72: mod_base = OTHER; note = 2'-O-methyl modified nucleotide
  modified_base 73: mod_base = OTHER; note = 2'-O-methyl modified nucleotide
  modified_base 74: mod_base = OTHER; note = 2'-O-methyl modified nucleotide
  modified_base 75: mod_base = OTHER; note = 2'-O-methyl modified nucleotide
  modified_base 76: mod_base = OTHER; note = 2'-O-methyl modified nucleotide
  modified_base 77: mod_base = OTHER; note = 2'-O-methyl modified nucleotide
  modified_base 78: mod_base = OTHER; note = 2'-O-methyl modified nucleotide
  modified_base 79: mod_base = OTHER; note = 2'-O-methyl modified nucleotide
  modified_base 80: mod_base = OTHER; note = 2'-O-methyl modified nucleotide
  modified_base 81: mod_base = OTHER; note = 2'-O-methyl modified nucleotide
  modified_base 82: mod_base = OTHER; note = 2'-O-methyl modified nucleotide
  modified_base 83: mod_base = OTHER; note = 2'-O-methyl modified nucleotide
  modified_base 84: mod_base = OTHER; note = 2'-O-methyl modified nucleotide
  modified_base 85: mod_base = OTHER; note = 2'-O-methyl modified nucleotide
  modified_base 86: mod_base = OTHER; note = 2'-O-methyl modified nucleotide
  modified_base 87: mod_base = OTHER; note = 2'-O-methyl modified nucleotide
  modified_base 88: mod_base = OTHER; note = 2'-O-methyl modified nucleotide
  modified_base 89: mod_base = OTHER; note = 2'-O-methyl modified nucleotide
  modified_base 90: mod_base = OTHER; note = 2'-O-methyl modified nucleotide
  modified_base 91: mod_base = OTHER; note = 2'-O-methyl modified nucleotide
  modified_base 92: mod_base = OTHER; note = 2'-O-methyl modified nucleotide
  modified_base 93: mod_base = OTHER; note = 2'-O-methyl modified nucleotide
  modified_base 94: mod_base = OTHER; note = 2'-O-methyl modified nucleotide
  modified_base 95: mod_base = OTHER; note = 2'-O-methyl modified nucleotide
  modified_base 96: mod_base = OTHER; note = 2'-O-methyl modified nucleotide
  modified_base 97: mod_base = OTHER; note = 2'-O-methyl modified nucleotide with phosphorothioate linkage
  modified_base 98: mod_base = OTHER; note = 2'-O-methyl modified nucleotide with phosphorothioate linkage
  modified_base 99: mod_base = OTHER; note = 2'-O-methyl modified nucleotide with phosphorothioate linkage
  modified_base 100: mod_base = OTHER; note = 2'-O-methyl modified nucleotide
  misc_difference 97..100: note = This region may encompass 0-4 nucleotides

SEQ ID NO: 2360 - RNA, 100 nt, synthetic construct; identical to SEQ ID NO: 1360
  source 1..100: mol_type = other RNA
  modified_base 1: mod_base = OTHER; note = 2'-O-methyl modified nucleotide with phosphorothioate linkage
  modified_base 2: mod_base = OTHER; note = 2'-O-methyl modified nucleotide with phosphorothioate linkage
  modified_base 3: mod_base = OTHER; note = 2'-O-methyl modified nucleotide with phosphorothioate linkage
  modified_base 29: mod_base = OTHER; note = 2'-O-methyl modified nucleotide
  modified_base 30: mod_base = OTHER; note = 2'-O-methyl modified nucleotide
  modified_base 31: mod_base = OTHER; note = 2'-O-methyl modified nucleotide
  modified_base 32: mod_base = OTHER; note = 2'-O-methyl modified nucleotide
  modified_base 33: mod_base = OTHER; note = 2'-O-methyl modified nucleotide
  modified_base 34: mod_base = OTHER; note = 2'-O-methyl modified nucleotide
  modified_base 35: mod_base = OTHER; note = 2'-O-methyl modified nucleotide
  modified_base 36: mod_base = OTHER; note = 2'-O-methyl modified nucleotide
  modified_base 37: mod_base = OTHER; note = 2'-O-methyl modified nucleotide
  modified_base 38: mod_base = OTHER; note = 2'-O-methyl modified nucleotide
  modified_base 39: mod_base = OTHER; note = 2'-O-methyl modified nucleotide
  modified_base 40: mod_base = OTHER; note = 2'-O-methyl modified nucleotide
  modified_base 69: mod_base = OTHER; note = 2'-O-methyl modified nucleotide
  modified_base 70: mod_base = OTHER; note = 2'-O-methyl modified nucleotide
  modified_base 71: mod_base = OTHER; note = 2'-O-methyl modified nucleotide
  modified_base 72: mod_base = OTHER; note = 2'-O-methyl modified nucleotide
  modified_base 73: mod_base = OTHER; note = 2'-O-methyl modified nucleotide
  modified_base 74: mod_base = OTHER; note = 2'-O-methyl modified nucleotide
  modified_base 75: mod_base = OTHER; note = 2'-O-methyl modified nucleotide
  modified_base 76: mod_base = OTHER; note = 2'-O-methyl modified nucleotide
  modified_base 77: mod_base = OTHER; note = 2'-O-methyl modified nucleotide
  modified_base 78: mod_base = OTHER; note = 2'-O-methyl modified nucleotide
  modified_base 79: mod_base = OTHER; note = 2'-O-methyl modified nucleotide
  modified_base 80: mod_base = OTHER; note = 2'-O-methyl modified nucleotide
  modified_base 81: mod_base = OTHER; note = 2'-O-methyl modified nucleotide
  modified_base 82: mod_base = OTHER; note = 2'-O-methyl modified nucleotide
  modified_base 83: mod_base = OTHER; note = 2'-O-methyl modified nucleotide
  modified_base 84: mod_base = OTHER; note = 2'-O-methyl modified nucleotide
  modified_base 85: mod_base = OTHER; note = 2'-O-methyl modified nucleotide
  modified_base 86: mod_base = OTHER; note = 2'-O-methyl modified nucleotide
  modified_base 87: mod_base = OTHER; note = 2'-O-methyl modified nucleotide
  modified_base 88: mod_base = OTHER; note = 2'-O-methyl modified nucleotide
  modified_base 89: mod_base = OTHER; note = 2'-O-methyl modified nucleotide
  modified_base 90: mod_base = OTHER; note = 2'-O-methyl modified nucleotide
  modified_base 91: mod_base = OTHER; note = 2'-O-methyl modified nucleotide
  modified_base 92: mod_base = OTHER; note = 2'-O-methyl modified nucleotide
  modified_base 93: mod_base = OTHER; note = 2'-O-methyl modified nucleotide
  modified_base 94: mod_base = OTHER; note = 2'-O-methyl modified nucleotide
  modified_base 95: mod_base = OTHER; note = 2'-O-methyl modified nucleotide
  modified_base 96: mod_base = OTHER; note = 2'-O-methyl modified nucleotide
  modified_base 97: mod_base = OTHER; note = 2'-O-methyl modified nucleotide with phosphorothioate linkage
  modified_base 98: mod_base = OTHER; note = 2'-O-methyl modified nucleotide with phosphorothioate linkage
  modified_base 99: mod_base = OTHER; note = 2'-O-methyl modified nucleotide with phosphorothioate linkage
  modified_base 100: mod_base = OTHER; note = 2'-O-methyl modified nucleotide
  misc_difference 97..100: note = This region may encompass 0-4 nucleotides

SEQ ID NO: 2361 - RNA, 100 nt, synthetic construct; identical to SEQ ID NO: 1361
  source 1..100: mol_type = other RNA
  modified_base 1: mod_base = OTHER; note = 2'-O-methyl modified nucleotide with phosphorothioate linkage
  modified_base 2: mod_base = OTHER; note = 2'-O-methyl modified nucleotide with phosphorothioate linkage
  modified_base 3: mod_base = OTHER; note = 2'-O-methyl modified nucleotide with phosphorothioate linkage
  modified_base 29: mod_base = OTHER; note = 2'-O-methyl modified nucleotide
  modified_base 30: mod_base = OTHER; note = 2'-O-methyl modified nucleotide
  modified_base 31: mod_base = OTHER; note = 2'-O-methyl modified nucleotide
  modified_base 32: mod_base = OTHER; note = 2'-O-methyl modified nucleotide
  modified_base 33: mod_base = OTHER; note = 2'-O-methyl modified nucleotide
  modified_base 34: mod_base = OTHER; note = 2'-O-methyl modified nucleotide
  modified_base 35: mod_base = OTHER; note = 2'-O-methyl modified nucleotide
  modified_base 36: mod_base = OTHER; note = 2'-O-methyl modified nucleotide
  modified_base 37: mod_base = OTHER; note = 2'-O-methyl modified nucleotide
  modified_base 38: mod_base = OTHER; note = 2'-O-methyl modified nucleotide
  modified_base 39: mod_base = OTHER; note = 2'-O-methyl modified nucleotide
  modified_base 40: mod_base = OTHER; note = 2'-O-methyl modified nucleotide
  modified_base 69: mod_base = OTHER; note = 2'-O-methyl modified nucleotide
  modified_base 70: mod_base = OTHER; note = 2'-O-methyl modified nucleotide
  modified_base 71: mod_base = OTHER; note = 2'-O-methyl modified nucleotide
  modified_base 72: mod_base = OTHER; note = 2'-O-methyl modified nucleotide
  modified_base 73: mod_base = OTHER; note = 2'-O-methyl modified nucleotide
  modified_base 74: mod_base = OTHER; note = 2'-O-methyl modified nucleotide
  modified_base 75: mod_base = OTHER; note = 2'-O-methyl modified nucleotide
  modified_base 76: mod_base = OTHER; note = 2'-O-methyl modified nucleotide
  modified_base 77: mod_base = OTHER; note = 2'-O-methyl modified nucleotide
  modified_base 78: mod_base = OTHER; note = 2'-O-methyl modified nucleotide
  modified_base 79: mod_base = OTHER; note = 2'-O-methyl modified nucleotide
  modified_base 80: mod_base = OTHER; note = 2'-O-methyl modified nucleotide
  modified_base 81: mod_base = OTHER; note = 2'-O-methyl modified nucleotide
  modified_base 82: mod_base = OTHER; note = 2'-O-methyl modified nucleotide
  modified_base 83: mod_base = OTHER; note = 2'-O-methyl modified nucleotide
  modified_base 84: mod_base = OTHER; note = 2'-O-methyl modified nucleotide
  modified_base 85: mod_base = OTHER; note = 2'-O-methyl modified nucleotide
  modified_base 86: mod_base = OTHER; note = 2'-O-methyl modified nucleotide
  modified_base 87: mod_base = OTHER; note = 2'-O-methyl modified nucleotide
  modified_base 88: mod_base = OTHER; note = 2'-O-methyl modified nucleotide
  modified_base 89: mod_base = OTHER; note = 2'-O-methyl modified nucleotide
  modified_base 90: mod_base = OTHER; note = 2'-O-methyl modified nucleotide
  modified_base 91: mod_base = OTHER; note = 2'-O-methyl modified nucleotide
  modified_base 92: mod_base = OTHER; note = 2'-O-methyl modified nucleotide
  modified_base 93: mod_base = OTHER; note = 2'-O-methyl modified nucleotide
  modified_base 94: mod_base = OTHER; note = 2'-O-methyl modified nucleotide
  modified_base 95: mod_base = OTHER; note = 2'-O-methyl modified nucleotide
  modified_base 96: mod_base = OTHER; note = 2'-O-methyl modified nucleotide
  modified_base 97: mod_base = OTHER; note = 2'-O-methyl modified nucleotide with phosphorothioate linkage
  modified_base 98: mod_base = OTHER; note = 2'-O-methyl modified nucleotide with phosphorothioate linkage
  modified_base 99: mod_base = OTHER; note = 2'-O-methyl modified nucleotide with phosphorothioate linkage
  modified_base 100: mod_base = OTHER; note = 2'-O-methyl modified nucleotide
  misc_difference 97..100: note = This region may encompass 0-4 nucleotides

SEQ ID NO: 2362 - RNA, 100 nt, synthetic construct; identical to SEQ ID NO: 1362
  source 1..100: mol_type = other RNA
  modified_base 1: mod_base = OTHER; note = 2'-O-methyl modified nucleotide with phosphorothioate linkage
  modified_base 2: mod_base = OTHER; note = 2'-O-methyl modified nucleotide with phosphorothioate linkage
  modified_base 3: mod_base = OTHER; note = 2'-O-methyl modified nucleotide with phosphorothioate linkage
  modified_base 29: mod_base = OTHER; note = 2'-O-methyl modified nucleotide
  modified_base 30: mod_base = OTHER; note = 2'-O-methyl modified nucleotide
  modified_base 31: mod_base = OTHER; note = 2'-O-methyl modified nucleotide
  modified_base 32: mod_base = OTHER; note = 2'-O-methyl modified nucleotide
  modified_base 33: mod_base = OTHER; note = 2'-O-methyl modified nucleotide
  modified_base 34: mod_base = OTHER; note = 2'-O-methyl modified nucleotide
  modified_base 35: mod_base = OTHER; note = 2'-O-methyl modified nucleotide
  modified_base 36: mod_base = OTHER; note = 2'-O-methyl modified nucleotide
  modified_base 37: mod_base = OTHER; note = 2'-O-methyl modified nucleotide
  modified_base 38: mod_base = OTHER; note = 2'-O-methyl modified nucleotide
  modified_base 39: mod_base = OTHER; note = 2'-O-methyl modified nucleotide
  modified_base 40: mod_base = OTHER; note = 2'-O-methyl modified nucleotide
  modified_base 69: mod_base = OTHER; note = 2'-O-methyl modified nucleotide
  modified_base 70: mod_base = OTHER; note = 2'-O-methyl modified nucleotide
  modified_base 71: mod_base = OTHER; note = 2'-O-methyl modified nucleotide
  modified_base 72: mod_base = OTHER; note = 2'-O-methyl modified nucleotide
  modified_base 73: mod_base = OTHER; note = 2'-O-methyl modified nucleotide
  modified_base 74: mod_base = OTHER; note = 2'-O-methyl modified nucleotide
  modified_base 75: mod_base = OTHER; note = 2'-O-methyl modified nucleotide
  modified_base 76: mod_base = OTHER; note = 2'-O-methyl modified nucleotide
  modified_base 77: mod_base = OTHER; note = 2'-O-methyl modified nucleotide
  modified_base 78: mod_base = OTHER; note = 2'-O-methyl modified nucleotide
  modified_base 79: mod_base = OTHER; note = 2'-O-methyl modified nucleotide
  modified_base 80: mod_base = OTHER; note = 2'-O-methyl modified nucleotide
  modified_base 81: mod_base = OTHER; note = 2'-O-methyl modified nucleotide
  modified_base 82: mod_base = OTHER; note = 2'-O-methyl modified nucleotide
  modified_base 83: mod_base = OTHER; note = 2'-O-methyl modified nucleotide
  modified_base 84: mod_base = OTHER; note = 2'-O-methyl modified nucleotide
  modified_base 85: mod_base = OTHER; note = 2'-O-methyl modified nucleotide
  modified_base 86: mod_base = OTHER; note = 2'-O-methyl modified nucleotide
  modified_base 87: mod_base = OTHER; note = 2'-O-methyl modified nucleotide
  modified_base 88: mod_base = OTHER; note = 2'-O-methyl modified nucleotide
  modified_base 89: mod_base = OTHER; note = 2'-O-methyl modified nucleotide
  modified_base 90: mod_base = OTHER; note = 2'-O-methyl modified nucleotide
  modified_base 91: mod_base = OTHER; note = 2'-O-methyl modified nucleotide
  modified_base 92: mod_base = OTHER; note = 2'-O-methyl modified nucleotide
  modified_base 93: mod_base = OTHER; note = 2'-O-methyl modified nucleotide
  modified_base 94: mod_base = OTHER; note = 2'-O-methyl modified nucleotide
  modified_base 95: mod_base = OTHER; note = 2'-O-methyl modified nucleotide
  modified_base 96: mod_base = OTHER; note = 2'-O-methyl modified nucleotide
  modified_base 97: mod_base = OTHER; note = 2'-O-methyl modified nucleotide with phosphorothioate linkage
  modified_base 98: mod_base = OTHER; note = 2'-O-methyl modified nucleotide with phosphorothioate linkage
  modified_base 99: mod_base = OTHER; note = 2'-O-methyl modified nucleotide with phosphorothioate linkage
  modified_base 100: mod_base = OTHER; note = 2'-O-methyl modified nucleotide
  misc_difference 97..100: note = This region may encompass 0-4 nucleotides

SEQ ID NO: 2363 - RNA, 100 nt, synthetic construct; identical to SEQ ID NO: 1363
  source 1..100: mol_type = other RNA
  modified_base 1: mod_base = OTHER; note = 2'-O-methyl modified nucleotide with phosphorothioate linkage
  modified_base 2: mod_base = OTHER; note = 2'-O-methyl modified nucleotide with phosphorothioate linkage
  modified_base 3: mod_base = OTHER; note = 2'-O-methyl modified nucleotide with phosphorothioate linkage
  modified_base 29: mod_base = OTHER; note = 2'-O-methyl modified nucleotide
  modified_base 30: mod_base = OTHER; note = 2'-O-methyl modified nucleotide
  modified_base 31: mod_base = OTHER; note = 2'-O-methyl modified nucleotide
  modified_base 32: mod_base = OTHER; note = 2'-O-methyl modified nucleotide
  modified_base 33: mod_base = OTHER; note = 2'-O-methyl modified nucleotide
  modified_base 34: mod_base = OTHER; note = 2'-O-methyl modified nucleotide
  modified_base 35: mod_base = OTHER; note = 2'-O-methyl modified nucleotide
  modified_base 36: mod_base = OTHER; note = 2'-O-methyl modified nucleotide
  modified_base 37: mod_base = OTHER; note = 2'-O-methyl modified nucleotide
  modified_base 38: mod_base = OTHER; note = 2'-O-methyl modified nucleotide
  modified_base 39: mod_base = OTHER; note = 2'-O-methyl modified nucleotide
  modified_base 40: mod_base = OTHER; note = 2'-O-methyl modified nucleotide
  modified_base 69: mod_base = OTHER; note = 2'-O-methyl modified nucleotide
  modified_base 70: mod_base = OTHER; note = 2'-O-methyl modified nucleotide
  modified_base 71: mod_base = OTHER; note = 2'-O-methyl modified nucleotide
  modified_base 72: mod_base = OTHER; note = 2'-O-methyl modified nucleotide
  modified_base 73: mod_base = OTHER; note = 2'-O-methyl modified nucleotide
  modified_base 74: mod_base = OTHER; note = 2'-O-methyl modified nucleotide
  modified_base 75: mod_base = OTHER; note = 2'-O-methyl modified nucleotide
  modified_base 76: mod_base = OTHER; note = 2'-O-methyl modified nucleotide
  modified_base 77: mod_base = OTHER; note = 2'-O-methyl modified nucleotide
  modified_base 78: mod_base = OTHER; note = 2'-O-methyl modified nucleotide
  modified_base 79: mod_base = OTHER; note = 2'-O-methyl modified nucleotide
  modified_base 80: mod_base = OTHER; note = 2'-O-methyl modified nucleotide
  modified_base 81: mod_base = OTHER; note = 2'-O-methyl modified nucleotide
  modified_base 82: mod_base = OTHER; note = 2'-O-methyl modified nucleotide
  modified_base 83: mod_base = OTHER; note = 2'-O-methyl modified nucleotide
  modified_base 84: mod_base = OTHER; note = 2'-O-methyl modified nucleotide
  modified_base 85: mod_base = OTHER; note = 2'-O-methyl modified nucleotide
  modified_base 86: mod_base = OTHER; note = 2'-O-methyl modified nucleotide
  modified_base 87: mod_base = OTHER; note = 2'-O-methyl modified nucleotide
  modified_base 88: mod_base = OTHER; note = 2'-O-methyl modified nucleotide
  modified_base 89: mod_base = OTHER; note = 2'-O-methyl modified nucleotide
  modified_base 90: mod_base = OTHER; note = 2'-O-methyl modified nucleotide
  modified_base 91: mod_base = OTHER; note = 2'-O-methyl modified nucleotide
  modified_base 92: mod_base = OTHER; note = 2'-O-methyl modified nucleotide
  modified_base 93: mod_base = OTHER; note = 2'-O-methyl modified nucleotide
  modified_base 94: mod_base = OTHER; note = 2'-O-methyl modified nucleotide
  modified_base 95: mod_base = OTHER; note = 2'-O-methyl modified nucleotide
  modified_base 96: mod_base = OTHER; note = 2'-O-methyl modified nucleotide
  modified_base 97: mod_base = OTHER; note = 2'-O-methyl modified nucleotide with phosphorothioate linkage
  modified_base 98: mod_base = OTHER; note = 2'-O-methyl modified nucleotide with phosphorothioate linkage
  modified_base 99: mod_base = OTHER; note = 2'-O-methyl modified nucleotide with phosphorothioate linkage
  modified_base 100: mod_base = OTHER; note = 2'-O-methyl modified nucleotide
  misc_difference 97..100: note = This region may encompass 0-4 nucleotides

SEQ ID NO: 2364 - RNA, 100 nt, synthetic construct; identical to SEQ ID NO: 1364
  source 1..100: mol_type = other RNA
  modified_base 1: mod_base = OTHER; note = 2'-O-methyl modified nucleotide with phosphorothioate linkage
  modified_base 2: mod_base = OTHER; note = 2'-O-methyl modified nucleotide with phosphorothioate linkage
  modified_base 3: mod_base = OTHER; note = 2'-O-methyl modified nucleotide with phosphorothioate linkage
  modified_base 29: mod_base = OTHER; note = 2'-O-methyl modified nucleotide
  modified_base 30: mod_base = OTHER; note = 2'-O-methyl modified nucleotide
  modified_base 31: mod_base = OTHER; note = 2'-O-methyl modified nucleotide
  modified_base 32: mod_base = OTHER; note = 2'-O-methyl modified nucleotide
  modified_base 33: mod_base = OTHER; note = 2'-O-methyl modified nucleotide
  modified_base 34: mod_base = OTHER; note = 2'-O-methyl modified nucleotide
  modified_base 35: mod_base = OTHER; note = 2'-O-methyl modified nucleotide
  modified_base 36: mod_base = OTHER; note = 2'-O-methyl modified nucleotide
  modified_base 37: mod_base = OTHER; note = 2'-O-methyl modified nucleotide
  modified_base 38: mod_base = OTHER; note = 2'-O-methyl modified nucleotide
  modified_base 39: mod_base = OTHER; note = 2'-O-methyl modified nucleotide
  modified_base 40: mod_base = OTHER; note = 2'-O-methyl modified nucleotide
  modified_base 69: mod_base = OTHER; note = 2'-O-methyl modified nucleotide
  modified_base 70: mod_base = OTHER; note = 2'-O-methyl modified nucleotide
  modified_base 71: mod_base = OTHER; note = 2'-O-methyl modified nucleotide
  modified_base 72: mod_base = OTHER; note = 2'-O-methyl modified nucleotide
  modified_base 73: mod_base = OTHER; note = 2'-O-methyl modified nucleotide
  modified_base 74: mod_base = OTHER; note = 2'-O-methyl modified nucleotide
  modified_base 75: mod_base = OTHER; note = 2'-O-methyl modified nucleotide
  modified_base 76: mod_base = OTHER; note = 2'-O-methyl modified nucleotide
  modified_base 77: mod_base = OTHER; note = 2'-O-methyl modified nucleotide
  modified_base 78: mod_base = OTHER; note = 2'-O-methyl modified nucleotide
  modified_base 79: mod_base = OTHER; note = 2'-O-methyl modified nucleotide
  modified_base 80: mod_base = OTHER; note = 2'-O-methyl modified nucleotide
  modified_base 81: mod_base = OTHER; note = 2'-O-methyl modified nucleotide
  modified_base 82: mod_base = OTHER; note = 2'-O-methyl modified nucleotide
  modified_base 83: mod_base = OTHER; note = 2'-O-methyl modified nucleotide
  modified_base 84: mod_base = OTHER; note = 2'-O-methyl modified nucleotide
  modified_base 85: mod_base = OTHER; note = 2'-O-methyl modified nucleotide
  modified_base 86: mod_base = OTHER; note = 2'-O-methyl modified nucleotide
  modified_base 87: mod_base = OTHER; note = 2'-O-methyl modified nucleotide
  modified_base 88: mod_base = OTHER; note = 2'-O-methyl modified nucleotide
  modified_base 89: mod_base = OTHER; note = 2'-O-methyl modified nucleotide
  modified_base 90: mod_base = OTHER; note = 2'-O-methyl modified nucleotide
  modified_base 91: mod_base = OTHER; note = 2'-O-methyl modified nucleotide
  modified_base 92: mod_base = OTHER; note = 2'-O-methyl modified nucleotide
  modified_base 93: mod_base = OTHER; note = 2'-O-methyl modified nucleotide
  modified_base 94: mod_base = OTHER; note = 2'-O-methyl modified nucleotide
  modified_base 95: mod_base = OTHER; note = 2'-O-methyl modified nucleotide
  modified_base 96: mod_base = OTHER; note = 2'-O-methyl modified nucleotide
  modified_base 97: mod_base = OTHER; note = 2'-O-methyl modified nucleotide with phosphorothioate linkage
  modified_base 98: mod_base = OTHER; note = 2'-O-methyl modified nucleotide with phosphorothioate linkage
  modified_base 99: mod_base = OTHER; note = 2'-O-methyl modified nucleotide with phosphorothioate linkage
  modified_base 100: mod_base = OTHER; note = 2'-O-methyl modified nucleotide
  misc_difference 97..100: note = This region may encompass 0-4 nucleotides

SEQ ID NO: 2365 - RNA, 100 nt, synthetic construct; identical to SEQ ID NO: 1365
  source 1..100: mol_type = other RNA
  modified_base 1: mod_base = OTHER; note = 2'-O-methyl modified nucleotide with phosphorothioate linkage
  modified_base 2: mod_base = OTHER; note = 2'-O-methyl modified nucleotide with phosphorothioate linkage
  modified_base 3: mod_base = OTHER; note = 2'-O-methyl modified nucleotide with phosphorothioate linkage
  modified_base 29: mod_base = OTHER; note = 2'-O-methyl modified nucleotide
  modified_base 30: mod_base = OTHER; note = 2'-O-methyl modified nucleotide
  modified_base 31: mod_base = OTHER; note = 2'-O-methyl modified nucleotide
  modified_base 32: mod_base = OTHER; note = 2'-O-methyl modified nucleotide
  modified_base 33: mod_base = OTHER; note = 2'-O-methyl modified nucleotide
  modified_base 34: mod_base = OTHER; note = 2'-O-methyl modified nucleotide
  modified_base 35: mod_base = OTHER; note = 2'-O-methyl modified nucleotide
  modified_base 36: mod_base = OTHER; note = 2'-O-methyl modified nucleotide
  modified_base 37: mod_base = OTHER; note = 2'-O-methyl modified nucleotide
  modified_base 38: mod_base = OTHER; note = 2'-O-methyl modified nucleotide
  modified_base 39: mod_base = OTHER; note = 2'-O-methyl modified nucleotide
  modified_base 40: mod_base = OTHER; note = 2'-O-methyl modified nucleotide
  modified_base 69: mod_base = OTHER; note = 2'-O-methyl modified nucleotide
  modified_base 70: mod_base = OTHER; note = 2'-O-methyl modified nucleotide
  modified_base 71: mod_base = OTHER; note = 2'-O-methyl modified nucleotide
  modified_base 72: mod_base = OTHER; note = 2'-O-methyl modified nucleotide
  modified_base 73: mod_base = OTHER; note = 2'-O-methyl modified nucleotide
  modified_base 74: mod_base = OTHER; note = 2'-O-methyl modified nucleotide
  modified_base 75: mod_base = OTHER; note = 2'-O-methyl modified nucleotide
  modified_base 76: mod_base = OTHER; note = 2'-O-methyl modified nucleotide
  modified_base 77: mod_base = OTHER; note = 2'-O-methyl modified nucleotide
  modified_base 78: mod_base = OTHER; note = 2'-O-methyl modified nucleotide
  modified_base 79: mod_base = OTHER; note = 2'-O-methyl modified nucleotide
  modified_base 80: mod_base = OTHER; note = 2'-O-methyl modified nucleotide
  modified_base 81: mod_base = OTHER; note = 2'-O-methyl modified nucleotide
  modified_base 82: mod_base = OTHER; note = 2'-O-methyl modified nucleotide
  modified_base 83: mod_base = OTHER; note = 2'-O-methyl modified nucleotide
  modified_base 84: mod_base = OTHER; note = 2'-O-methyl modified nucleotide
  modified_base 85: mod_base = OTHER; note = 2'-O-methyl modified nucleotide
  modified_base 86: mod_base = OTHER; note = 2'-O-methyl modified nucleotide
  modified_base 87: mod_base = OTHER; note = 2'-O-methyl modified nucleotide
  modified_base 88: mod_base = OTHER; note = 2'-O-methyl modified nucleotide
  modified_base 89: mod_base = OTHER; note = 2'-O-methyl modified nucleotide
  modified_base 90: mod_base = OTHER; note = 2'-O-methyl modified nucleotide
  modified_base 91: mod_base = OTHER; note = 2'-O-methyl modified nucleotide
  modified_base 92: mod_base = OTHER; note = 2'-O-methyl modified nucleotide
  modified_base 93: mod_base = OTHER; note = 2'-O-methyl modified nucleotide
  modified_base 94: mod_base = OTHER; note = 2'-O-methyl modified nucleotide
  modified_base 95: mod_base = OTHER; note = 2'-O-methyl modified nucleotide
  modified_base 96: mod_base = OTHER; note = 2'-O-methyl modified nucleotide
  modified_base 97: mod_base = OTHER; note = 2'-O-methyl modified nucleotide with phosphorothioate linkage
  modified_base 98: mod_base = OTHER; note = 2'-O-methyl modified nucleotide with phosphorothioate linkage
  modified_base 99: mod_base = OTHER; note = 2'-O-methyl modified nucleotide with phosphorothioate linkage
  modified_base 100: mod_base = OTHER; note = 2'-O-methyl modified nucleotide
  misc_difference 97..100: note = This region may encompass 0-4 nucleotides

SEQ ID NO: 2366 - RNA, 100 nt, synthetic construct; identical to SEQ ID NO: 1366
  source 1..100: mol_type = other RNA
  modified_base 1: mod_base = OTHER; note = 2'-O-methyl modified nucleotide with phosphorothioate linkage
  modified_base 2: mod_base = OTHER; note = 2'-O-methyl modified nucleotide with phosphorothioate linkage
  modified_base 3: mod_base = OTHER; note = 2'-O-methyl modified nucleotide with phosphorothioate linkage
  modified_base 29: mod_base = OTHER; note = 2'-O-methyl modified nucleotide
  modified_base 30: mod_base = OTHER; note = 2'-O-methyl modified nucleotide
  modified_base 31: mod_base = OTHER; note = 2'-O-methyl modified nucleotide
  modified_base 32: mod_base = OTHER; note = 2'-O-methyl modified nucleotide
  modified_base 33: mod_base = OTHER; note = 2'-O-methyl modified nucleotide
  modified_base 34: mod_base = OTHER; note = 2'-O-methyl modified nucleotide
  modified_base 35: mod_base = OTHER; note = 2'-O-methyl modified nucleotide
  modified_base 36: mod_base = OTHER; note = 2'-O-methyl modified nucleotide
  modified_base 37: mod_base = OTHER; note = 2'-O-methyl modified nucleotide
  modified_base 38: mod_base = OTHER; note = 2'-O-methyl modified nucleotide
  modified_base 39: mod_base = OTHER; note = 2'-O-methyl modified nucleotide
  modified_base 40: mod_base = OTHER; note = 2'-O-methyl modified nucleotide
  modified_base 69: mod_base = OTHER; note = 2'-O-methyl modified nucleotide
  modified_base 70: mod_base = OTHER; note = 2'-O-methyl modified nucleotide
  modified_base 71: mod_base = OTHER; note = 2'-O-methyl modified nucleotide
  modified_base 72: mod_base = OTHER; note = 2'-O-methyl modified nucleotide
  modified_base 73: mod_base = OTHER; note = 2'-O-methyl modified nucleotide
  modified_base 74: mod_base = OTHER; note = 2'-O-methyl modified nucleotide
  modified_base 75: mod_base = OTHER; note = 2'-O-methyl modified nucleotide
  modified_base 76: mod_base = OTHER; note = 2'-O-methyl modified nucleotide
  modified_base 77: mod_base = OTHER; note = 2'-O-methyl modified nucleotide
  modified_base 78: mod_base = OTHER; note = 2'-O-methyl modified nucleotide
  modified_base 79: mod_base = OTHER; note = 2'-O-methyl modified nucleotide
  modified_base 80: mod_base = OTHER; note = 2'-O-methyl modified nucleotide
  modified_base 81: mod_base = OTHER; note = 2'-O-methyl modified nucleotide
  modified_base 82: mod_base = OTHER; note = 2'-O-methyl modified nucleotide
  modified_base 83: mod_base = OTHER; note = 2'-O-methyl modified nucleotide
  modified_base 84: mod_base = OTHER; note = 2'-O-methyl modified nucleotide
  modified_base 85: mod_base = OTHER; note = 2'-O-methyl modified nucleotide
  modified_base 86: mod_base = OTHER; note = 2'-O-methyl modified nucleotide
  modified_base 87: mod_base = OTHER; note = 2'-O-methyl modified nucleotide
  modified_base 88: mod_base = OTHER; note = 2'-O-methyl modified nucleotide
  modified_base 89: mod_base = OTHER; note = 2'-O-methyl modified nucleotide
  modified_base 90: mod_base = OTHER; note = 2'-O-methyl modified nucleotide
  modified_base 91: mod_base = OTHER; note = 2'-O-methyl modified nucleotide
  modified_base 92: mod_base = OTHER; note = 2'-O-methyl modified nucleotide
  modified_base 93: mod_base = OTHER; note = 2'-O-methyl modified nucleotide
  modified_base 94: mod_base = OTHER; note = 2'-O-methyl modified nucleotide
  modified_base 95: mod_base = OTHER; note = 2'-O-methyl modified nucleotide
  modified_base 96: mod_base = OTHER; note = 2'-O-methyl modified nucleotide
  modified_base 97: mod_base = OTHER; note = 2'-O-methyl modified nucleotide with phosphorothioate linkage
  modified_base 98: mod_base = OTHER; note = 2'-O-methyl modified nucleotide with phosphorothioate linkage
  modified_base 99: mod_base = OTHER; note = 2'-O-methyl modified nucleotide with phosphorothioate linkage
  modified_base 100: mod_base = OTHER; note = 2'-O-methyl modified nucleotide
  misc_difference 97..100: note = This region may encompass 0-4 nucleotides

SEQ ID NO: 2367 - RNA, 100 nt, synthetic construct; identical to SEQ ID NO: 1367
  source 1..100: mol_type = other RNA
  modified_base 1: mod_base = OTHER; note = 2'-O-methyl modified nucleotide with phosphorothioate linkage
  modified_base 2: mod_base = OTHER; note = 2'-O-methyl modified nucleotide with phosphorothioate linkage
  modified_base 3: mod_base = OTHER; note = 2'-O-methyl modified nucleotide with phosphorothioate linkage
  modified_base 29: mod_base = OTHER; note = 2'-O-methyl modified nucleotide
  modified_base 30: mod_base = OTHER; note = 2'-O-methyl modified nucleotide
  modified_base 31: mod_base = OTHER; note = 2'-O-methyl modified nucleotide
  modified_base 32: mod_base = OTHER; note = 2'-O-methyl modified nucleotide
  modified_base 33: mod_base = OTHER; note = 2'-O-methyl modified nucleotide
  modified_base 34: mod_base = OTHER; note = 2'-O-methyl modified nucleotide
  modified_base 35: mod_base = OTHER; note = 2'-O-methyl modified nucleotide
  modified_base 36: mod_base = OTHER; note = 2'-O-methyl modified nucleotide
  modified_base 37: mod_base = OTHER; note = 2'-O-methyl modified nucleotide
  modified_base 38: mod_base = OTHER; note = 2'-O-methyl modified nucleotide
  modified_base 39: mod_base = OTHER; note = 2'-O-methyl modified nucleotide
  modified_base 40: mod_base = OTHER; note = 2'-O-methyl modified nucleotide
  modified_base 69: mod_base = OTHER; note = 2'-O-methyl modified nucleotide
  modified_base 70: mod_base = OTHER; note = 2'-O-methyl modified nucleotide
  modified_base 71: mod_base = OTHER; note = 2'-O-methyl modified nucleotide
  modified_base 72: mod_base = OTHER; note = 2'-O-methyl modified nucleotide
  modified_base 73: mod_base = OTHER; note = 2'-O-methyl modified nucleotide
  modified_base 74: mod_base = OTHER; note = 2'-O-methyl modified nucleotide
  modified_base 75: mod_base = OTHER; note = 2'-O-methyl modified nucleotide
  modified_base 76: mod_base = OTHER; note = 2'-O-methyl modified nucleotide
  modified_base 77: mod_base = OTHER; note = 2'-O-methyl modified nucleotide
  modified_base 78: mod_base = OTHER; note = 2'-O-methyl modified nucleotide
  modified_base 79: mod_base = OTHER; note = 2'-O-methyl modified nucleotide
  modified_base 80: mod_base = OTHER; note = 2'-O-methyl modified nucleotide
  modified_base 81: mod_base = OTHER; note = 2'-O-methyl modified nucleotide
  modified_base 82: mod_base = OTHER; note = 2'-O-methyl modified nucleotide
  modified_base 83: mod_base = OTHER; note = 2'-O-methyl modified nucleotide
  modified_base 84: mod_base = OTHER; note = 2'-O-methyl modified nucleotide
  modified_base 85: mod_base = OTHER; note = 2'-O-methyl modified nucleotide
  modified_base 86: mod_base = OTHER; note = 2'-O-methyl modified nucleotide
  modified_base 87: mod_base = OTHER; note = 2'-O-methyl modified nucleotide
  modified_base 88: mod_base = OTHER; note = 2'-O-methyl modified nucleotide
  modified_base 89: mod_base = OTHER; note = 2'-O-methyl modified nucleotide
  modified_base 90: mod_base = OTHER; note = 2'-O-methyl modified nucleotide
  modified_base 91: mod_base = OTHER; note = 2'-O-methyl modified nucleotide
  modified_base 92: mod_base = OTHER; note = 2'-O-methyl modified nucleotide
  modified_base 93: mod_base = OTHER; note = 2'-O-methyl modified nucleotide
  modified_base 94: mod_base = OTHER; note = 2'-O-methyl modified nucleotide
  modified_base 95: mod_base = OTHER; note = 2'-O-methyl modified nucleotide
  modified_base 96: mod_base = OTHER; note = 2'-O-methyl modified nucleotide
  modified_base 97: mod_base = OTHER; note = 2'-O-methyl modified nucleotide with phosphorothioate linkage
  modified_base 98: mod_base = OTHER; note = 2'-O-methyl modified nucleotide with phosphorothioate linkage
  modified_base 99: mod_base = OTHER; note = 2'-O-methyl modified nucleotide with phosphorothioate linkage
  modified_base 100: mod_base = OTHER; note = 2'-O-methyl modified nucleotide
  misc_difference 97..100: note = This region may encompass 0-4 nucleotides

SEQ ID NO: 2368 - RNA, 100 nt, synthetic construct; identical to SEQ ID NO: 1368
  source 1..100: mol_type = other RNA
  modified_base 1: mod_base = OTHER; note = 2'-O-methyl modified nucleotide with phosphorothioate linkage
  modified_base 2: mod_base = OTHER; note = 2'-O-methyl modified nucleotide with phosphorothioate linkage
  modified_base 3: mod_base = OTHER; note = 2'-O-methyl modified nucleotide with phosphorothioate linkage
  modified_base 29: mod_base = OTHER; note = 2'-O-methyl modified nucleotide
  modified_base 30: mod_base = OTHER; note = 2'-O-methyl modified nucleotide
  modified_base 31: mod_base = OTHER; note = 2'-O-methyl modified nucleotide
  modified_base 32: mod_base = OTHER; note = 2'-O-methyl modified nucleotide
  modified_base 33: mod_base = OTHER; note = 2'-O-methyl modified nucleotide
  modified_base 34: mod_base = OTHER; note = 2'-O-methyl modified nucleotide
  modified_base 35: mod_base = OTHER; note = 2'-O-methyl modified nucleotide
  modified_base 36: mod_base = OTHER; note = 2'-O-methyl modified nucleotide
  modified_base 37: mod_base = OTHER; note = 2'-O-methyl modified nucleotide
  modified_base 38: mod_base = OTHER; note = 2'-O-methyl modified nucleotide
  modified_base 39: mod_base = OTHER; note = 2'-O-methyl modified nucleotide
  modified_base 40: mod_base = OTHER; note = 2'-O-methyl modified nucleotide
  modified_base 69: mod_base = OTHER; note = 2'-O-methyl modified nucleotide
  modified_base 70: mod_base = OTHER; note = 2'-O-methyl modified nucleotide
  modified_base 71: mod_base = OTHER; note = 2'-O-methyl modified nucleotide
  modified_base 72: mod_base = OTHER; note = 2'-O-methyl modified nucleotide
  modified_base 73: mod_base = OTHER; note = 2'-O-methyl modified nucleotide
  modified_base 74: mod_base = OTHER; note = 2'-O-methyl modified nucleotide
  modified_base 75: mod_base = OTHER; note = 2'-O-methyl modified nucleotide
  modified_base 76: mod_base = OTHER; note = 2'-O-methyl modified nucleotide
  modified_base 77: mod_base = OTHER; note = 2'-O-methyl modified nucleotide
  modified_base 78: mod_base = OTHER; note = 2'-O-methyl modified nucleotide
  modified_base 79: mod_base = OTHER; note = 2'-O-methyl modified nucleotide
  modified_base 80: mod_base = OTHER; note = 2'-O-methyl modified nucleotide
  modified_base 81: mod_base = OTHER; note = 2'-O-methyl modified nucleotide
  modified_base 82: mod_base = OTHER; note = 2'-O-methyl modified nucleotide
  modified_base 83: mod_base = OTHER; note = 2'-O-methyl modified nucleotide
  modified_base 84: mod_base = OTHER; note = 2'-O-methyl modified nucleotide
  modified_base 85: mod_base = OTHER; note = 2'-O-methyl modified nucleotide
  modified_base 86: mod_base = OTHER; note = 2'-O-methyl modified nucleotide
  modified_base 87: mod_base = OTHER; note = 2'-O-methyl modified nucleotide
  modified_base 88: mod_base = OTHER; note = 2'-O-methyl modified nucleotide
  modified_base 89: mod_base = OTHER; note = 2'-O-methyl modified nucleotide
  modified_base 90: mod_base = OTHER; note = 2'-O-methyl modified nucleotide
  modified_base 91: mod_base = OTHER; note = 2'-O-methyl modified nucleotide
  modified_base 92: mod_base = OTHER; note = 2'-O-methyl modified nucleotide
  modified_base 93: mod_base = OTHER; note = 2'-O-methyl modified nucleotide
  modified_base 94: mod_base = OTHER; note = 2'-O-methyl modified nucleotide
  modified_base 95: mod_base = OTHER; note = 2'-O-methyl modified nucleotide
  modified_base 96: mod_base = OTHER; note = 2'-O-methyl modified nucleotide
  modified_base 97: mod_base = OTHER; note = 2'-O-methyl modified nucleotide with phosphorothioate linkage
  modified_base 98: mod_base = OTHER; note = 2'-O-methyl modified nucleotide with phosphorothioate linkage
  modified_base 99: mod_base = OTHER; note = 2'-O-methyl modified nucleotide with phosphorothioate linkage
  modified_base 100: mod_base = OTHER; note = 2'-O-methyl modified nucleotide
  misc_difference 97..100: note = This region may encompass 0-4 nucleotides

SEQ ID NO: 2369 - RNA, 100 nt, synthetic construct; identical to SEQ ID NO: 1369
  source 1..100: mol_type = other RNA
  modified_base 1: mod_base = OTHER; note = 2'-O-methyl modified nucleotide with phosphorothioate linkage
  modified_base 2: mod_base = OTHER; note = 2'-O-methyl modified nucleotide with phosphorothioate linkage
  modified_base 3: mod_base = OTHER; note = 2'-O-methyl modified nucleotide with phosphorothioate linkage
  modified_base 29: mod_base = OTHER; note = 2'-O-methyl modified nucleotide
  modified_base 30: mod_base = OTHER; note = 2'-O-methyl modified nucleotide
  modified_base 31: mod_base = OTHER; note = 2'-O-methyl modified nucleotide
  modified_base 32: mod_base = OTHER; note = 2'-O-methyl modified nucleotide
  modified_base 33: mod_base = OTHER; note = 2'-O-methyl modified nucleotide
  modified_base 34: mod_base = OTHER; note = 2'-O-methyl modified nucleotide
  modified_base 35: mod_base = OTHER; note = 2'-O-methyl modified nucleotide
  modified_base 36: mod_base = OTHER; note = 2'-O-methyl modified nucleotide
  modified_base 37: mod_base = OTHER; note = 2'-O-methyl modified nucleotide
  modified_base 38: mod_base = OTHER; note = 2'-O-methyl modified nucleotide
  modified_base 39: mod_base = OTHER; note = 2'-O-methyl modified nucleotide
  modified_base 40: mod_base = OTHER; note = 2'-O-methyl modified nucleotide
  modified_base 69: mod_base = OTHER; note = 2'-O-methyl modified nucleotide
  modified_base 70: mod_base = OTHER; note = 2'-O-methyl modified nucleotide
  modified_base 71: mod_base = OTHER; note = 2'-O-methyl modified nucleotide
  modified_base 72: mod_base = OTHER; note = 2'-O-methyl modified nucleotide
  modified_base 73: mod_base = OTHER; note = 2'-O-methyl modified nucleotide
  modified_base 74: mod_base = OTHER; note = 2'-O-methyl modified nucleotide
  modified_base 75: mod_base = OTHER; note = 2'-O-methyl modified nucleotide
  modified_base 76: mod_base = OTHER; note = 2'-O-methyl modified nucleotide
  modified_base 77: mod_base = OTHER; note = 2'-O-methyl modified nucleotide
  modified_base 78: mod_base = OTHER; note = 2'-O-methyl modified nucleotide
  modified_base 79: mod_base = OTHER; note = 2'-O-methyl modified nucleotide
  modified_base 80: mod_base = OTHER; note = 2'-O-methyl modified nucleotide
  modified_base 81: mod_base = OTHER; note = 2'-O-methyl modified nucleotide
  modified_base 82: mod_base = OTHER; note = 2'-O-methyl modified nucleotide
  modified_base 83: mod_base = OTHER; note = 2'-O-methyl modified nucleotide
  modified_base 84: mod_base = OTHER; note = 2'-O-methyl modified nucleotide
  modified_base 85: mod_base = OTHER; note = 2'-O-methyl modified nucleotide
  modified_base 86: mod_base = OTHER; note = 2'-O-methyl modified nucleotide
  modified_base 87: mod_base = OTHER; note = 2'-O-methyl modified nucleotide
  modified_base 88: mod_base = OTHER; note = 2'-O-methyl modified nucleotide
  modified_base 89: mod_base = OTHER; note = 2'-O-methyl modified nucleotide
  modified_base 90: mod_base = OTHER; note = 2'-O-methyl modified nucleotide
  modified_base 91: mod_base = OTHER; note = 2'-O-methyl modified nucleotide
  modified_base 92: mod_base = OTHER; note = 2'-O-methyl modified nucleotide
  modified_base 93: mod_base = OTHER; note = 2'-O-methyl modified nucleotide
  modified_base 94: mod_base = OTHER; note = 2'-O-methyl modified nucleotide
  modified_base 95: mod_base = OTHER; note = 2'-O-methyl modified nucleotide
  modified_base 96: mod_base = OTHER; note = 2'-O-methyl modified nucleotide
  modified_base 97: mod_base = OTHER; note = 2'-O-methyl modified nucleotide with phosphorothioate linkage
  modified_base 98: mod_base = OTHER; note = 2'-O-methyl modified nucleotide with phosphorothioate linkage
  modified_base 99: mod_base = OTHER; note = 2'-O-methyl modified nucleotide with phosphorothioate linkage
  modified_base 100: mod_base = OTHER; note = 2'-O-methyl modified nucleotide
  misc_difference 97..100: note = This region may encompass 0-4 nucleotides

SEQ ID NO: 2370 - RNA, 100 nt, synthetic construct; identical to SEQ ID NO: 1370
  source 1..100: mol_type = other RNA
  modified_base 1: mod_base = OTHER; note = 2'-O-methyl modified nucleotide with phosphorothioate linkage
  modified_base 2: mod_base = OTHER; note = 2'-O-methyl modified nucleotide with phosphorothioate linkage
  modified_base 3: mod_base = OTHER; note = 2'-O-methyl modified nucleotide with phosphorothioate linkage
  modified_base 29: mod_base = OTHER; note = 2'-O-methyl modified nucleotide
  modified_base 30: mod_base = OTHER; note = 2'-O-methyl modified nucleotide
  modified_base 31: mod_base = OTHER; note = 2'-O-methyl modified nucleotide
  modified_base 32: mod_base = OTHER; note = 2'-O-methyl modified nucleotide
  modified_base 33: mod_base = OTHER; note = 2'-O-methyl modified nucleotide
  modified_base 34: mod_base = OTHER; note = 2'-O-methyl modified nucleotide
  modified_base 35: mod_base = OTHER; note = 2'-O-methyl modified nucleotide
  modified_base 36: mod_base = OTHER; note = 2'-O-methyl modified nucleotide
  modified_base 37: mod_base = OTHER; note = 2'-O-methyl modified nucleotide
  modified_base 38: mod_base = OTHER; note = 2'-O-methyl modified nucleotide
  modified_base 39: mod_base = OTHER; note = 2'-O-methyl modified nucleotide
  modified_base 40: mod_base = OTHER; note = 2'-O-methyl modified nucleotide
  modified_base 69: mod_base = OTHER; note = 2'-O-methyl modified nucleotide
  modified_base 70: mod_base = OTHER; note = 2'-O-methyl modified nucleotide
  modified_base 71: mod_base = OTHER; note = 2'-O-methyl modified nucleotide
  modified_base 72: mod_base = OTHER; note = 2'-O-methyl modified nucleotide
  modified_base 73: mod_base = OTHER; note = 2'-O-methyl modified nucleotide
  modified_base 74: mod_base = OTHER; note = 2'-O-methyl modified nucleotide
  modified_base 75: mod_base = OTHER; note = 2'-O-methyl modified nucleotide
  modified_base 76: mod_base = OTHER; note = 2'-O-methyl modified nucleotide
  modified_base 77: mod_base = OTHER; note = 2'-O-methyl modified nucleotide
  modified_base 78: mod_base = OTHER; note = 2'-O-methyl modified nucleotide
  modified_base 79: mod_base = OTHER; note = 2'-O-methyl modified nucleotide
  modified_base 80: mod_base = OTHER; note = 2'-O-methyl modified nucleotide
  modified_base 81: mod_base = OTHER; note = 2'-O-methyl modified nucleotide
  modified_base 82: mod_base = OTHER; note = 2'-O-methyl modified nucleotide
  modified_base 83: mod_base = OTHER; note = 2'-O-methyl modified nucleotide
  modified_base 84: mod_base = OTHER; note = 2'-O-methyl modified nucleotide
  modified_base 85: mod_base = OTHER; note = 2'-O-methyl modified nucleotide
  modified_base 86: mod_base = OTHER; note = 2'-O-methyl modified nucleotide
  modified_base 87: mod_base = OTHER; note = 2'-O-methyl modified nucleotide
  modified_base 88: mod_base = OTHER; note = 2'-O-methyl modified nucleotide
  modified_base 89: mod_base = OTHER; note = 2'-O-methyl modified nucleotide
  modified_base 90: mod_base = OTHER; note = 2'-O-methyl modified nucleotide
  modified_base 91: mod_base = OTHER; note = 2'-O-methyl modified nucleotide
  modified_base 92: mod_base = OTHER; note = 2'-O-methyl modified nucleotide
  modified_base 93: mod_base = OTHER; note = 2'-O-methyl modified nucleotide
  modified_base 94: mod_base = OTHER; note = 2'-O-methyl modified nucleotide
  modified_base 95: mod_base = OTHER; note = 2'-O-methyl modified nucleotide
  modified_base 96: mod_base = OTHER; note = 2'-O-methyl modified nucleotide
  modified_base 97: mod_base = OTHER; note = 2'-O-methyl modified nucleotide with phosphorothioate linkage
  modified_base 98: mod_base = OTHER; note = 2'-O-methyl modified nucleotide with phosphorothioate linkage
  modified_base 99: mod_base = OTHER; note = 2'-O-methyl modified nucleotide with phosphorothioate linkage
  modified_base 100: mod_base = OTHER; note = 2'-O-methyl modified nucleotide
  misc_difference 97..100: note = This region may encompass 0-4 nucleotides

SEQ ID NO: 2371 - RNA, 100 nt, synthetic construct; identical to SEQ ID NO: 1371
  source 1..100: mol_type = other RNA
  modified_base 1: mod_base = OTHER; note = 2'-O-methyl modified nucleotide with phosphorothioate linkage
  modified_base 2: mod_base = OTHER; note = 2'-O-methyl modified nucleotide with phosphorothioate linkage
  modified_base 3: mod_base = OTHER; note = 2'-O-methyl modified nucleotide with phosphorothioate linkage
  modified_base 29: mod_base = OTHER; note = 2'-O-methyl modified nucleotide
  modified_base 30: mod_base = OTHER; note = 2'-O-methyl modified nucleotide
  modified_base 31: mod_base = OTHER; note = 2'-O-methyl modified nucleotide
  modified_base 32: mod_base = OTHER; note = 2'-O-methyl modified nucleotide
  modified_base 33: mod_base = OTHER; note = 2'-O-methyl modified nucleotide
  modified_base 34: mod_base = OTHER; note = 2'-O-methyl modified nucleotide
  modified_base 35: mod_base = OTHER; note = 2'-O-methyl modified nucleotide
  modified_base 36: mod_base = OTHER; note = 2'-O-methyl modified nucleotide
  modified_base 37: mod_base = OTHER; note = 2'-O-methyl modified nucleotide
  modified_base 38: mod_base = OTHER; note = 2'-O-methyl modified nucleotide
  modified_base 39: mod_base = OTHER; note = 2'-O-methyl modified nucleotide
  modified_base 40: mod_base = OTHER; note = 2'-O-methyl modified nucleotide
  modified_base 69: mod_base = OTHER; note = 2'-O-methyl modified nucleotide
  modified_base 70: mod_base = OTHER; note = 2'-O-methyl modified nucleotide
  modified_base 71: mod_base = OTHER; note = 2'-O-methyl modified nucleotide
  modified_base 72: mod_base = OTHER; note = 2'-O-methyl modified nucleotide
  modified_base 73: mod_base = OTHER; note = 2'-O-methyl modified nucleotide
  modified_base 74: mod_base = OTHER; note = 2'-O-methyl modified nucleotide
  modified_base 75: mod_base = OTHER; note = 2'-O-methyl modified nucleotide
  modified_base 76: mod_base = OTHER; note = 2'-O-methyl modified nucleotide
  modified_base 77: mod_base = OTHER; note = 2'-O-methyl modified nucleotide
  modified_base 78: mod_base = OTHER; note = 2'-O-methyl modified nucleotide
  modified_base 79: mod_base = OTHER; note = 2'-O-methyl modified nucleotide
  modified_base 80: mod_base = OTHER; note = 2'-O-methyl modified nucleotide
  modified_base 81: mod_base = OTHER; note = 2'-O-methyl modified nucleotide
  modified_base 82: mod_base = OTHER; note = 2'-O-methyl modified nucleotide
  modified_base 83: mod_base = OTHER; note = 2'-O-methyl modified nucleotide
  modified_base 84: mod_base = OTHER; note = 2'-O-methyl modified nucleotide
  modified_base 85: mod_base = OTHER; note = 2'-O-methyl modified nucleotide
  modified_base 86: mod_base = OTHER; note = 2'-O-methyl modified nucleotide
  modified_base 87: mod_base = OTHER; note = 2'-O-methyl modified nucleotide
  modified_base 88: mod_base = OTHER; note = 2'-O-methyl modified nucleotide
  modified_base 89: mod_base = OTHER; note = 2'-O-methyl modified nucleotide
  modified_base 90: mod_base = OTHER; note = 2'-O-methyl modified nucleotide
  modified_base 91: mod_base = OTHER; note = 2'-O-methyl modified nucleotide
  modified_base 92: mod_base = OTHER; note = 2'-O-methyl modified nucleotide
  modified_base 93: mod_base = OTHER; note = 2'-O-methyl modified nucleotide
  modified_base 94: mod_base = OTHER; note = 2'-O-methyl modified nucleotide
  modified_base 95: mod_base = OTHER; note = 2'-O-methyl modified nucleotide
  modified_base 96: mod_base = OTHER; note = 2'-O-methyl modified nucleotide
  modified_base 97: mod_base = OTHER; note = 2'-O-methyl modified nucleotide with phosphorothioate linkage
  modified_base 98: mod_base = OTHER; note = 2'-O-methyl modified nucleotide with phosphorothioate linkage
  modified_base 99: mod_base = OTHER; note = 2'-O-methyl modified nucleotide with phosphorothioate linkage
  modified_base 100: mod_base = OTHER; note = 2'-O-methyl modified nucleotide
  misc_difference 97..100: note = This region may encompass 0-4 nucleotides

SEQ ID NO: 2372 - RNA, 100 nt, synthetic construct; identical to SEQ ID NO: 1372
  source 1..100: mol_type = other RNA
  modified_base 1: mod_base = OTHER; note = 2'-O-methyl modified nucleotide with phosphorothioate linkage
  modified_base 2: mod_base = OTHER; note = 2'-O-methyl modified nucleotide with phosphorothioate linkage
  modified_base 3: mod_base = OTHER; note = 2'-O-methyl modified nucleotide with phosphorothioate linkage
  modified_base 29: mod_base = OTHER; note = 2'-O-methyl modified nucleotide
  modified_base 30: mod_base = OTHER; note = 2'-O-methyl modified nucleotide
  modified_base 31: mod_base = OTHER; note = 2'-O-methyl modified nucleotide
  modified_base 32: mod_base = OTHER; note = 2'-O-methyl modified nucleotide
  modified_base 33: mod_base = OTHER; note = 2'-O-methyl modified nucleotide
  modified_base 34: mod_base = OTHER; note = 2'-O-methyl modified nucleotide
  modified_base 35: mod_base = OTHER; note = 2'-O-methyl modified nucleotide
  modified_base 36: mod_base = OTHER; note = 2'-O-methyl modified nucleotide
  modified_base 37: mod_base = OTHER; note = 2'-O-methyl modified nucleotide
  modified_base 38: mod_base = OTHER; note = 2'-O-methyl modified nucleotide
  modified_base 39: mod_base = OTHER; note = 2'-O-methyl modified nucleotide
  modified_base 40: mod_base = OTHER; note = 2'-O-methyl modified nucleotide
  modified_base 69: mod_base = OTHER; note = 2'-O-methyl modified nucleotide
  modified_base 70: mod_base = OTHER; note = 2'-O-methyl modified nucleotide
  modified_base 71: mod_base = OTHER; note = 2'-O-methyl modified nucleotide
  modified_base 72: mod_base = OTHER; note = 2'-O-methyl modified nucleotide
  modified_base 73: mod_base = OTHER; note = 2'-O-methyl modified nucleotide
  modified_base 74: mod_base = OTHER; note = 2'-O-methyl modified nucleotide
  modified_base 75: mod_base = OTHER; note = 2'-O-methyl modified nucleotide
  modified_base 76: mod_base = OTHER; note = 2'-O-methyl modified nucleotide
  modified_base 77: mod_base = OTHER; note = 2'-O-methyl modified nucleotide
  modified_base 78: mod_base = OTHER; note = 2'-O-methyl modified nucleotide
  modified_base 79: mod_base = OTHER; note = 2'-O-methyl modified nucleotide
  modified_base 80: mod_base = OTHER; note = 2'-O-methyl modified nucleotide
  modified_base 81: mod_base = OTHER; note = 2'-O-methyl modified nucleotide
  modified_base 82: mod_base = OTHER; note = 2'-O-methyl modified nucleotide
  modified_base 83: mod_base = OTHER; note = 2'-O-methyl modified nucleotide
  modified_base 84: mod_base = OTHER; note = 2'-O-methyl modified nucleotide
  modified_base 85: mod_base = OTHER; note = 2'-O-methyl modified nucleotide
  modified_base 86: mod_base = OTHER; note = 2'-O-methyl modified nucleotide
  modified_base 87: mod_base = OTHER; note = 2'-O-methyl modified nucleotide
  modified_base 88: mod_base = OTHER; note = 2'-O-methyl modified nucleotide
  modified_base 89: mod_base = OTHER; note = 2'-O-methyl modified nucleotide
  modified_base 90: mod_base = OTHER; note = 2'-O-methyl modified nucleotide
  modified_base 91: mod_base = OTHER; note = 2'-O-methyl modified nucleotide
  modified_base 92: mod_base = OTHER; note = 2'-O-methyl modified nucleotide
  modified_base 93: mod_base = OTHER; note = 2'-O-methyl modified nucleotide
  modified_base 94: mod_base = OTHER; note = 2'-O-methyl modified nucleotide
  modified_base 95: mod_base = OTHER; note = 2'-O-methyl modified nucleotide
  modified_base 96: mod_base = OTHER; note = 2'-O-methyl modified nucleotide
  modified_base 97: mod_base = OTHER; note = 2'-O-methyl modified nucleotide with phosphorothioate linkage
  modified_base 98: mod_base = OTHER; note = 2'-O-methyl modified nucleotide with phosphorothioate linkage
  modified_base 99: mod_base = OTHER; note = 2'-O-methyl modified nucleotide with phosphorothioate linkage
  modified_base 100: mod_base = OTHER; note = 2'-O-methyl modified nucleotide
  misc_difference 97..100: note = This region may encompass 0-4 nucleotides

SEQ ID NO: 2373 - RNA, 100 nt, synthetic construct; identical to SEQ ID NO: 1373
  source 1..100: mol_type = other RNA
  modified_base 1: mod_base = OTHER; note = 2'-O-methyl modified nucleotide with phosphorothioate linkage
  modified_base 2: mod_base = OTHER; note = 2'-O-methyl modified nucleotide with phosphorothioate linkage
  modified_base 3: mod_base = OTHER; note = 2'-O-methyl modified nucleotide with phosphorothioate linkage
  modified_base 29: mod_base = OTHER; note = 2'-O-methyl modified nucleotide
  modified_base 30: mod_base = OTHER; note = 2'-O-methyl modified nucleotide
  modified_base 31: mod_base = OTHER; note = 2'-O-methyl modified nucleotide
  modified_base 32: mod_base = OTHER; note = 2'-O-methyl modified nucleotide
  modified_base 33: mod_base = OTHER; note = 2'-O-methyl modified nucleotide
  modified_base 34: mod_base = OTHER; note = 2'-O-methyl modified nucleotide
  modified_base 35: mod_base = OTHER; note = 2'-O-methyl modified nucleotide
  modified_base 36: mod_base = OTHER; note = 2'-O-methyl modified nucleotide
  modified_base 37: mod_base = OTHER; note = 2'-O-methyl modified nucleotide
  modified_base 38: mod_base = OTHER; note = 2'-O-methyl modified nucleotide
  modified_base 39: mod_base = OTHER; note = 2'-O-methyl modified nucleotide
  modified_base 40: mod_base = OTHER; note = 2'-O-methyl modified nucleotide
  modified_base 69: mod_base = OTHER; note = 2'-O-methyl modified nucleotide
  modified_base 70: mod_base = OTHER; note = 2'-O-methyl modified nucleotide
  modified_base 71: mod_base = OTHER; note = 2'-O-methyl modified nucleotide
  modified_base 72: mod_base = OTHER; note = 2'-O-methyl modified nucleotide
  modified_base 73: mod_base = OTHER; note = 2'-O-methyl modified nucleotide
  modified_base 74: mod_base = OTHER; note = 2'-O-methyl modified nucleotide
  modified_base 75: mod_base = OTHER; note = 2'-O-methyl modified nucleotide
  modified_base 76: mod_base = OTHER; note = 2'-O-methyl modified nucleotide
  modified_base 77: mod_base = OTHER; note = 2'-O-methyl modified nucleotide
  modified_base 78: mod_base = OTHER; note = 2'-O-methyl modified nucleotide
  modified_base 79: mod_base = OTHER; note = 2'-O-methyl modified nucleotide
  modified_base 80: mod_base = OTHER; note = 2'-O-methyl modified nucleotide
  modified_base 81: mod_base = OTHER; note = 2'-O-methyl modified nucleotide
  modified_base 82: mod_base = OTHER; note = 2'-O-methyl modified nucleotide
  modified_base 83: mod_base = OTHER; note = 2'-O-methyl modified nucleotide
  modified_base 84: mod_base = OTHER; note = 2'-O-methyl modified nucleotide
  modified_base 85: mod_base = OTHER; note = 2'-O-methyl modified nucleotide
  modified_base 86: mod_base = OTHER; note = 2'-O-methyl modified nucleotide
  modified_base 87: mod_base = OTHER; note = 2'-O-methyl modified nucleotide
  modified_base 88: mod_base = OTHER; note = 2'-O-methyl modified nucleotide
  modified_base 89: mod_base = OTHER; note = 2'-O-methyl modified nucleotide
  modified_base 90: mod_base = OTHER; note = 2'-O-methyl modified nucleotide
  modified_base 91: mod_base = OTHER; note = 2'-O-methyl modified nucleotide
  modified_base 92: mod_base = OTHER; note = 2'-O-methyl modified nucleotide
  modified_base 93: mod_base = OTHER; note = 2'-O-methyl modified nucleotide
  modified_base 94: mod_base = OTHER; note = 2'-O-methyl modified nucleotide
  modified_base 95: mod_base = OTHER; note = 2'-O-methyl modified nucleotide
  modified_base 96: mod_base = OTHER; note = 2'-O-methyl modified nucleotide
  modified_base 97: mod_base = OTHER; note = 2'-O-methyl modified nucleotide with phosphorothioate linkage
  modified_base 98: mod_base = OTHER; note = 2'-O-methyl modified nucleotide with phosphorothioate linkage
  modified_base 99: mod_base = OTHER; note = 2'-O-methyl modified nucleotide with phosphorothioate linkage
  modified_base 100: mod_base = OTHER; note = 2'-O-methyl modified nucleotide
  misc_difference 97..100: note = This region may encompass 0-4 nucleotides

SEQ ID NO: 2374 - RNA, 100 nt, synthetic construct; identical to SEQ ID NO: 1374
  source 1..100: mol_type = other RNA
  modified_base 1: mod_base = OTHER; note = 2'-O-methyl modified nucleotide with phosphorothioate linkage
  modified_base 2: mod_base = OTHER; note = 2'-O-methyl modified nucleotide with phosphorothioate linkage
  modified_base 3: mod_base = OTHER; note = 2'-O-methyl modified nucleotide with phosphorothioate linkage
  modified_base 29: mod_base = OTHER; note = 2'-O-methyl modified nucleotide
  modified_base 30: mod_base = OTHER; note = 2'-O-methyl modified nucleotide
  modified_base 31: mod_base = OTHER; note = 2'-O-methyl modified nucleotide
  modified_base 32: mod_base = OTHER; note = 2'-O-methyl modified nucleotide
  modified_base 33: mod_base = OTHER; note = 2'-O-methyl modified nucleotide
  modified_base 34: mod_base = OTHER; note = 2'-O-methyl modified nucleotide
  modified_base 35: mod_base = OTHER; note = 2'-O-methyl modified nucleotide
  modified_base 36: mod_base = OTHER; note = 2'-O-methyl modified nucleotide
  modified_base 37: mod_base = OTHER; note = 2'-O-methyl modified nucleotide
  modified_base 38: mod_base = OTHER; note = 2'-O-methyl modified nucleotide
  modified_base 39: mod_base = OTHER; note = 2'-O-methyl modified nucleotide
  modified_base 40: mod_base = OTHER; note = 2'-O-methyl modified nucleotide
  modified_base 69: mod_base = OTHER; note = 2'-O-methyl modified nucleotide
  modified_base 70: mod_base = OTHER; note = 2'-O-methyl modified nucleotide
  modified_base 71: mod_base = OTHER; note = 2'-O-methyl modified nucleotide
  modified_base 72: mod_base = OTHER; note = 2'-O-methyl modified nucleotide
  modified_base 73: mod_base = OTHER; note = 2'-O-methyl modified nucleotide
  modified_base 74: mod_base = OTHER; note = 2'-O-methyl modified nucleotide
  modified_base 75: mod_base = OTHER; note = 2'-O-methyl modified nucleotide
  modified_base 76: mod_base = OTHER; note = 2'-O-methyl modified nucleotide
  modified_base 77: mod_base = OTHER; note = 2'-O-methyl modified nucleotide
  modified_base 78: mod_base = OTHER; note = 2'-O-methyl modified nucleotide
  modified_base 79: mod_base = OTHER; note = 2'-O-methyl modified nucleotide
  modified_base 80: mod_base = OTHER; note = 2'-O-methyl modified nucleotide
  modified_base 81: mod_base = OTHER; note = 2'-O-methyl modified nucleotide
  modified_base 82: mod_base = OTHER; note = 2'-O-methyl modified nucleotide
  modified_base 83: mod_base = OTHER; note = 2'-O-methyl modified nucleotide
  modified_base 84: mod_base = OTHER; note = 2'-O-methyl modified nucleotide
  modified_base 85: mod_base = OTHER; note = 2'-O-methyl modified nucleotide
  modified_base 86: mod_base = OTHER; note = 2'-O-methyl modified nucleotide
  modified_base 87: mod_base = OTHER; note = 2'-O-methyl modified nucleotide
  modified_base 88: mod_base = OTHER; note = 2'-O-methyl modified nucleotide
  modified_base 89: mod_base = OTHER; note = 2'-O-methyl modified nucleotide
  modified_base 90: mod_base = OTHER; note = 2'-O-methyl modified nucleotide
  modified_base 91: mod_base = OTHER; note = 2'-O-methyl modified nucleotide
  modified_base 92: mod_base = OTHER; note = 2'-O-methyl modified nucleotide
  modified_base 93: mod_base = OTHER; note = 2'-O-methyl modified nucleotide
  modified_base 94: mod_base = OTHER; note = 2'-O-methyl modified nucleotide
  modified_base 95: mod_base = OTHER; note = 2'-O-methyl modified nucleotide
  modified_base 96: mod_base = OTHER; note = 2'-O-methyl modified nucleotide
  modified_base 97: mod_base = OTHER; note = 2'-O-methyl modified nucleotide with phosphorothioate linkage
  modified_base 98: mod_base = OTHER; note = 2'-O-methyl modified nucleotide with phosphorothioate linkage
  modified_base 99: mod_base = OTHER; note = 2'-O-methyl modified nucleotide with phosphorothioate linkage
  modified_base 100: mod_base = OTHER; note = 2'-O-methyl modified nucleotide
  misc_difference 97..100: note = This region may encompass 0-4 nucleotides

SEQ ID NO: 2375 - RNA, 100 nt, synthetic construct; identical to SEQ ID NO: 1375
  source 1..100: mol_type = other RNA
  modified_base 1: mod_base = OTHER; note = 2'-O-methyl modified nucleotide with phosphorothioate linkage
  modified_base 2: mod_base = OTHER; note = 2'-O-methyl modified nucleotide with phosphorothioate linkage
  modified_base 3: mod_base = OTHER; note = 2'-O-methyl modified nucleotide with phosphorothioate linkage
  modified_base 29: mod_base = OTHER; note = 2'-O-methyl modified nucleotide
  modified_base 30: mod_base = OTHER; note = 2'-O-methyl modified nucleotide
  modified_base 31: mod_base = OTHER; note = 2'-O-methyl modified nucleotide
  modified_base 32: mod_base = OTHER; note = 2'-O-methyl modified nucleotide
  modified_base 33: mod_base = OTHER; note = 2'-O-methyl modified nucleotide
  modified_base 34: mod_base = OTHER; note = 2'-O-methyl modified nucleotide
  modified_base 35: mod_base = OTHER; note = 2'-O-methyl modified nucleotide
  modified_base 36: mod_base = OTHER; note = 2'-O-methyl modified nucleotide
  modified_base 37: mod_base = OTHER; note = 2'-O-methyl modified nucleotide
  modified_base 38: mod_base = OTHER; note = 2'-O-methyl modified nucleotide
  modified_base 39: mod_base = OTHER; note = 2'-O-methyl modified nucleotide
  modified_base 40: mod_base = OTHER; note = 2'-O-methyl modified nucleotide
  modified_base 69: mod_base = OTHER; note = 2'-O-methyl modified nucleotide
  modified_base 70: mod_base = OTHER; note = 2'-O-methyl modified nucleotide
  modified_base 71: mod_base = OTHER; note = 2'-O-methyl modified nucleotide
  modified_base 72: mod_base = OTHER; note = 2'-O-methyl modified nucleotide
  modified_base 73: mod_base = OTHER; note = 2'-O-methyl modified nucleotide
  modified_base 74: mod_base = OTHER; note = 2'-O-methyl modified nucleotide
  modified_base 75: mod_base = OTHER; note = 2'-O-methyl modified nucleotide
  modified_base 76: mod_base = OTHER; note = 2'-O-methyl modified nucleotide
  modified_base 77: mod_base = OTHER; note = 2'-O-methyl modified nucleotide
  modified_base 78: mod_base = OTHER; note = 2'-O-methyl modified nucleotide
  modified_base 79: mod_base = OTHER; note = 2'-O-methyl modified nucleotide
  modified_base 80: mod_base = OTHER; note = 2'-O-methyl modified nucleotide
  modified_base 81: mod_base = OTHER; note = 2'-O-methyl modified nucleotide
  modified_base 82: mod_base = OTHER; note = 2'-O-methyl modified nucleotide
  modified_base 83: mod_base = OTHER; note = 2'-O-methyl modified nucleotide
  modified_base 84: mod_base = OTHER; note = 2'-O-methyl modified nucleotide
  modified_base 85: mod_base = OTHER; note = 2'-O-methyl modified nucleotide
  modified_base 86: mod_base = OTHER; note = 2'-O-methyl modified nucleotide
  modified_base 87: mod_base = OTHER; note = 2'-O-methyl modified nucleotide
  modified_base 88: mod_base = OTHER; note = 2'-O-methyl modified nucleotide
  modified_base 89: mod_base = OTHER; note = 2'-O-methyl modified nucleotide
  modified_base 90: mod_base = OTHER; note = 2'-O-methyl modified nucleotide
  modified_base 91: mod_base = OTHER; note = 2'-O-methyl modified nucleotide
  modified_base 92: mod_base = OTHER; note = 2'-O-methyl modified nucleotide
  modified_base 93: mod_base = OTHER; note = 2'-O-methyl modified nucleotide
  modified_base 94: mod_base = OTHER; note = 2'-O-methyl modified nucleotide
  modified_base 95: mod_base = OTHER; note = 2'-O-methyl modified nucleotide
  modified_base 96: mod_base = OTHER; note = 2'-O-methyl modified nucleotide
  modified_base 97: mod_base = OTHER; note = 2'-O-methyl modified nucleotide with phosphorothioate linkage
  modified_base 98: mod_base = OTHER; note = 2'-O-methyl modified nucleotide with phosphorothioate linkage
  modified_base 99: mod_base = OTHER; note = 2'-O-methyl modified nucleotide with phosphorothioate linkage
  modified_base 100: mod_base = OTHER; note = 2'-O-methyl modified nucleotide
  misc_difference 97..100: note = This region may encompass 0-4 nucleotides

SEQ ID NO: 2376 - RNA, 100 nt, synthetic construct; identical to SEQ ID NO: 1376
  source 1..100: mol_type = other RNA
  modified_base 1: mod_base = OTHER; note = 2'-O-methyl modified nucleotide with phosphorothioate linkage
  modified_base 2: mod_base = OTHER; note = 2'-O-methyl modified nucleotide with phosphorothioate linkage
  modified_base 3: mod_base = OTHER; note = 2'-O-methyl modified nucleotide with phosphorothioate linkage
  modified_base 29: mod_base = OTHER; note = 2'-O-methyl modified nucleotide
  modified_base 30: mod_base = OTHER; note = 2'-O-methyl modified nucleotide
  modified_base 31: mod_base = OTHER; note = 2'-O-methyl modified nucleotide
  modified_base 32: mod_base = OTHER; note = 2'-O-methyl modified nucleotide
  modified_base 33: mod_base = OTHER; note = 2'-O-methyl modified nucleotide
  modified_base 34: mod_base = OTHER; note = 2'-O-methyl modified nucleotide
  modified_base 35: mod_base = OTHER; note = 2'-O-methyl modified nucleotide
  modified_base 36: mod_base = OTHER; note = 2'-O-methyl modified nucleotide
  modified_base 37: mod_base = OTHER; note = 2'-O-methyl modified nucleotide
  modified_base 38: mod_base = OTHER; note = 2'-O-methyl modified nucleotide
  modified_base 39: mod_base = OTHER; note = 2'-O-methyl modified nucleotide
  modified_base 40: mod_base = OTHER; note = 2'-O-methyl modified nucleotide
  modified_base 69: mod_base = OTHER; note = 2'-O-methyl modified nucleotide
  modified_base 70: mod_base = OTHER; note = 2'-O-methyl modified nucleotide
  modified_base 71: mod_base = OTHER; note = 2'-O-methyl modified nucleotide
  modified_base 72: mod_base = OTHER; note = 2'-O-methyl modified nucleotide
  modified_base 73: mod_base = OTHER; note = 2'-O-methyl modified nucleotide
  modified_base 74: mod_base = OTHER; note = 2'-O-methyl modified nucleotide
  modified_base 75: mod_base = OTHER; note = 2'-O-methyl modified nucleotide
  modified_base 76: mod_base = OTHER; note = 2'-O-methyl modified nucleotide
  modified_base 77: mod_base = OTHER; note = 2'-O-methyl modified nucleotide
  modified_base 78: mod_base = OTHER; note = 2'-O-methyl modified nucleotide
  modified_base 79: mod_base = OTHER; note = 2'-O-methyl modified nucleotide
  modified_base 80: mod_base = OTHER; note = 2'-O-methyl modified nucleotide
  modified_base 81: mod_base = OTHER; note = 2'-O-methyl modified nucleotide
  modified_base 82: mod_base = OTHER; note = 2'-O-methyl modified nucleotide
  modified_base 83: mod_base = OTHER; note = 2'-O-methyl modified nucleotide
  modified_base 84: mod_base = OTHER; note = 2'-O-methyl modified nucleotide
  modified_base 85: mod_base = OTHER; note = 2'-O-methyl modified nucleotide
  modified_base 86: mod_base = OTHER; note = 2'-O-methyl modified nucleotide
  modified_base 87: mod_base = OTHER; note = 2'-O-methyl modified nucleotide
  modified_base 88: mod_base = OTHER; note = 2'-O-methyl modified nucleotide
  modified_base 89: mod_base = OTHER; note = 2'-O-methyl modified nucleotide
  modified_base 90: mod_base = OTHER; note = 2'-O-methyl modified nucleotide
  modified_base 91: mod_base = OTHER; note = 2'-O-methyl modified nucleotide
  modified_base 92: mod_base = OTHER; note = 2'-O-methyl modified nucleotide
  modified_base 93: mod_base = OTHER; note = 2'-O-methyl modified nucleotide
  modified_base 94: mod_base = OTHER; note = 2'-O-methyl modified nucleotide
  modified_base 95: mod_base = OTHER; note = 2'-O-methyl modified nucleotide
  modified_base 96: mod_base = OTHER; note = 2'-O-methyl modified nucleotide
  modified_base 97: mod_base = OTHER; note = 2'-O-methyl modified nucleotide with phosphorothioate linkage
  modified_base 98: mod_base = OTHER; note = 2'-O-methyl modified nucleotide with phosphorothioate linkage
  modified_base 99: mod_base = OTHER; note = 2'-O-methyl modified nucleotide with phosphorothioate linkage
  modified_base 100: mod_base = OTHER; note = 2'-O-methyl modified nucleotide
  misc_difference 97..100: note = This region may encompass 0-4 nucleotides

SEQ ID NO: 2377 - RNA, 100 nt, synthetic construct; identical to SEQ ID NO: 1377
  source 1..100: mol_type = other RNA
  modified_base 1: mod_base = OTHER; note = 2'-O-methyl modified nucleotide with phosphorothioate linkage
  modified_base 2: mod_base = OTHER; note = 2'-O-methyl modified nucleotide with phosphorothioate linkage
  modified_base 3: mod_base = OTHER; note = 2'-O-methyl modified nucleotide with phosphorothioate linkage
  modified_base 29: mod_base = OTHER; note = 2'-O-methyl modified nucleotide
  modified_base 30: mod_base = OTHER; note = 2'-O-methyl modified nucleotide
  modified_base 31: mod_base = OTHER; note = 2'-O-methyl modified nucleotide
  modified_base 32: mod_base = OTHER; note = 2'-O-methyl modified nucleotide
  modified_base 33: mod_base = OTHER; note = 2'-O-methyl modified nucleotide
  modified_base 34: mod_base = OTHER; note = 2'-O-methyl modified nucleotide
  modified_base 35: mod_base = OTHER; note = 2'-O-methyl modified nucleotide
  modified_base 36: mod_base = OTHER; note = 2'-O-methyl modified nucleotide
  modified_base 37: mod_base = OTHER; note = 2'-O-methyl modified nucleotide
  modified_base 38: mod_base = OTHER; note = 2'-O-methyl modified nucleotide
  modified_base 39: mod_base = OTHER; note = 2'-O-methyl modified nucleotide
  modified_base 40: mod_base = OTHER; note = 2'-O-methyl modified nucleotide
  modified_base 69: mod_base = OTHER; note = 2'-O-methyl modified nucleotide
  modified_base 70: mod_base = OTHER; note = 2'-O-methyl modified nucleotide
  modified_base 71: mod_base = OTHER; note = 2'-O-methyl modified nucleotide
  modified_base 72: mod_base = OTHER; note = 2'-O-methyl modified nucleotide
  modified_base 73: mod_base = OTHER; note = 2'-O-methyl modified nucleotide
  modified_base 74: mod_base = OTHER; note = 2'-O-methyl modified nucleotide
  modified_base 75: mod_base = OTHER; note = 2'-O-methyl modified nucleotide
  modified_base 76: mod_base = OTHER; note = 2'-O-methyl modified nucleotide
  modified_base 77: mod_base = OTHER; note = 2'-O-methyl modified nucleotide
  modified_base 78: mod_base = OTHER; note = 2'-O-methyl modified nucleotide
  modified_base 79: mod_base = OTHER; note = 2'-O-methyl modified nucleotide
  modified_base 80: mod_base = OTHER; note = 2'-O-methyl modified nucleotide
  modified_base 81: mod_base = OTHER; note = 2'-O-methyl modified nucleotide
  modified_base 82: mod_base = OTHER; note = 2'-O-methyl modified nucleotide
  modified_base 83: mod_base = OTHER; note = 2'-O-methyl modified nucleotide
  modified_base 84: mod_base = OTHER; note = 2'-O-methyl modified nucleotide
  modified_base 85: mod_base = OTHER; note = 2'-O-methyl modified nucleotide
  modified_base 86: mod_base = OTHER; note = 2'-O-methyl modified nucleotide
  modified_base 87: mod_base = OTHER; note = 2'-O-methyl modified nucleotide
  modified_base 88: mod_base = OTHER; note = 2'-O-methyl modified nucleotide
  modified_base 89: mod_base = OTHER; note = 2'-O-methyl modified nucleotide
  modified_base 90: mod_base = OTHER; note = 2'-O-methyl modified nucleotide
  modified_base 91: mod_base = OTHER; note = 2'-O-methyl modified nucleotide
  modified_base 92: mod_base = OTHER; note = 2'-O-methyl modified nucleotide
  modified_base 93: mod_base = OTHER; note = 2'-O-methyl modified nucleotide
  modified_base 94: mod_base = OTHER; note = 2'-O-methyl modified nucleotide
  modified_base 95: mod_base = OTHER; note = 2'-O-methyl modified nucleotide
  modified_base 96: mod_base = OTHER; note = 2'-O-methyl modified nucleotide
  modified_base 97: mod_base = OTHER; note = 2'-O-methyl modified nucleotide with phosphorothioate linkage
  modified_base 98: mod_base = OTHER; note = 2'-O-methyl modified nucleotide with phosphorothioate linkage
  modified_base 99: mod_base = OTHER; note = 2'-O-methyl modified nucleotide with phosphorothioate linkage
  modified_base 100: mod_base = OTHER; note = 2'-O-methyl modified nucleotide
  misc_difference 97..100: note = This region may encompass 0-4 nucleotides

SEQ ID NO: 2378 - RNA, 100 nt, synthetic construct; identical to SEQ ID NO: 1378
  source 1..100: mol_type = other RNA
  modified_base 1: mod_base = OTHER; note = 2'-O-methyl modified nucleotide with phosphorothioate linkage
  modified_base 2: mod_base = OTHER; note = 2'-O-methyl modified nucleotide with phosphorothioate linkage
  modified_base 3: mod_base = OTHER; note = 2'-O-methyl modified nucleotide with phosphorothioate linkage
  modified_base 29: mod_base = OTHER; note = 2'-O-methyl modified nucleotide
  modified_base 30: mod_base = OTHER; note = 2'-O-methyl modified nucleotide
  modified_base 31: mod_base = OTHER; note = 2'-O-methyl modified nucleotide
  modified_base 32: mod_base = OTHER; note = 2'-O-methyl modified nucleotide
  modified_base 33: mod_base = OTHER; note = 2'-O-methyl modified nucleotide
  modified_base 34: mod_base = OTHER; note = 2'-O-methyl modified nucleotide
  modified_base 35: mod_base = OTHER; note = 2'-O-methyl modified nucleotide
  modified_base 36: mod_base = OTHER; note = 2'-O-methyl modified nucleotide
  modified_base 37: mod_base = OTHER; note = 2'-O-methyl modified nucleotide
  modified_base 38: mod_base = OTHER; note = 2'-O-methyl modified nucleotide
  modified_base 39: mod_base = OTHER; note = 2'-O-methyl modified nucleotide
  modified_base 40: mod_base = OTHER; note = 2'-O-methyl modified nucleotide
  modified_base 69: mod_base = OTHER; note = 2'-O-methyl modified nucleotide
  modified_base 70: mod_base = OTHER; note = 2'-O-methyl modified nucleotide
  modified_base 71: mod_base = OTHER; note = 2'-O-methyl modified nucleotide
  modified_base 72: mod_base = OTHER; note = 2'-O-methyl modified nucleotide
  modified_base 73: mod_base = OTHER; note = 2'-O-methyl modified nucleotide
  modified_base 74: mod_base = OTHER; note = 2'-O-methyl modified nucleotide
  modified_base 75: mod_base = OTHER; note = 2'-O-methyl modified nucleotide
  modified_base 76: mod_base = OTHER; note = 2'-O-methyl modified nucleotide
  modified_base 77: mod_base = OTHER; note = 2'-O-methyl modified nucleotide
  modified_base 78: mod_base = OTHER; note = 2'-O-methyl modified nucleotide
  modified_base 79: mod_base = OTHER; note = 2'-O-methyl modified nucleotide
  modified_base 80: mod_base = OTHER; note = 2'-O-methyl modified nucleotide
  modified_base 81: mod_base = OTHER; note = 2'-O-methyl modified nucleotide
  modified_base 82: mod_base = OTHER; note = 2'-O-methyl modified nucleotide
  modified_base 83: mod_base = OTHER; note = 2'-O-methyl modified nucleotide
  modified_base 84: mod_base = OTHER; note = 2'-O-methyl modified nucleotide
  modified_base 85: mod_base = OTHER; note = 2'-O-methyl modified nucleotide
  modified_base 86: mod_base = OTHER; note = 2'-O-methyl modified nucleotide
  modified_base 87: mod_base = OTHER; note = 2'-O-methyl modified nucleotide
  modified_base 88: mod_base = OTHER; note = 2'-O-methyl modified nucleotide
  modified_base 89: mod_base = OTHER; note = 2'-O-methyl modified nucleotide
  modified_base 90: mod_base = OTHER; note = 2'-O-methyl modified nucleotide
  modified_base 91: mod_base = OTHER; note = 2'-O-methyl modified nucleotide
  modified_base 92: mod_base = OTHER; note = 2'-O-methyl modified nucleotide
  modified_base 93: mod_base = OTHER; note = 2'-O-methyl modified nucleotide
  modified_base 94: mod_base = OTHER; note = 2'-O-methyl modified nucleotide
  modified_base 95: mod_base = OTHER; note = 2'-O-methyl modified nucleotide
  modified_base 96: mod_base = OTHER; note = 2'-O-methyl modified nucleotide
  modified_base 97: mod_base = OTHER; note = 2'-O-methyl modified nucleotide with phosphorothioate linkage
  modified_base 98: mod_base = OTHER; note = 2'-O-methyl modified nucleotide with phosphorothioate linkage
  modified_base 99: mod_base = OTHER; note = 2'-O-methyl modified nucleotide with phosphorothioate linkage
  modified_base 100: mod_base = OTHER; note = 2'-O-methyl modified nucleotide
  misc_difference 97..100: note = This region may encompass 0-4 nucleotides

SEQ ID NO: 2379 - RNA, 100 nt, synthetic construct; identical to SEQ ID NO: 1379
  source 1..100: mol_type = other RNA
  modified_base 1: mod_base = OTHER; note = 2'-O-methyl modified nucleotide with phosphorothioate linkage
  modified_base 2: mod_base = OTHER; note = 2'-O-methyl modified nucleotide with phosphorothioate linkage
  modified_base 3: mod_base = OTHER; note = 2'-O-methyl modified nucleotide with phosphorothioate linkage
  modified_base 29: mod_base = OTHER; note = 2'-O-methyl modified nucleotide
  modified_base 30: mod_base = OTHER; note = 2'-O-methyl modified nucleotide
  modified_base 31: mod_base = OTHER; note = 2'-O-methyl modified nucleotide
  modified_base 32: mod_base = OTHER; note = 2'-O-methyl modified nucleotide
  modified_base 33: mod_base = OTHER; note = 2'-O-methyl modified nucleotide
  modified_base 34: mod_base = OTHER; note = 2'-O-methyl modified nucleotide
  modified_base 35: mod_base = OTHER; note = 2'-O-methyl modified nucleotide
  modified_base 36: mod_base = OTHER; note = 2'-O-methyl modified nucleotide
  modified_base 37: mod_base = OTHER; note = 2'-O-methyl modified nucleotide
  modified_base 38: mod_base = OTHER; note = 2'-O-methyl modified nucleotide
  modified_base 39: mod_base = OTHER; note = 2'-O-methyl modified nucleotide
  modified_base 40: mod_base = OTHER; note = 2'-O-methyl modified nucleotide
  modified_base 69: mod_base = OTHER; note = 2'-O-methyl modified nucleotide
  modified_base 70: mod_base = OTHER; note = 2'-O-methyl modified nucleotide
  modified_base 71: mod_base = OTHER; note = 2'-O-methyl modified nucleotide
  modified_base 72: mod_base = OTHER; note = 2'-O-methyl modified nucleotide
  modified_base 73: mod_base = OTHER; note = 2'-O-methyl modified nucleotide
  modified_base 74: mod_base = OTHER; note = 2'-O-methyl modified nucleotide
  modified_base 75: mod_base = OTHER; note = 2'-O-methyl modified nucleotide
  modified_base 76: mod_base = OTHER; note = 2'-O-methyl modified nucleotide
  modified_base 77: mod_base = OTHER; note = 2'-O-methyl modified nucleotide
  modified_base 78: mod_base = OTHER; note = 2'-O-methyl modified nucleotide
  modified_base 79: mod_base = OTHER; note = 2'-O-methyl modified nucleotide
  modified_base 80: mod_base = OTHER; note = 2'-O-methyl modified nucleotide
  modified_base 81: mod_base = OTHER; note = 2'-O-methyl modified nucleotide
  modified_base 82: mod_base = OTHER; note = 2'-O-methyl modified nucleotide
  modified_base 83: mod_base = OTHER; note = 2'-O-methyl modified nucleotide
  modified_base 84: mod_base = OTHER; note = 2'-O-methyl modified nucleotide
  modified_base 85: mod_base = OTHER; note = 2'-O-methyl modified nucleotide
  modified_base 86: mod_base = OTHER; note = 2'-O-methyl modified nucleotide
  modified_base 87: mod_base = OTHER; note = 2'-O-methyl modified nucleotide
  modified_base 88: mod_base = OTHER; note = 2'-O-methyl modified nucleotide
  modified_base 89: mod_base = OTHER; note = 2'-O-methyl modified nucleotide
  modified_base 90: mod_base = OTHER; note = 2'-O-methyl modified nucleotide
  modified_base 91: mod_base = OTHER; note = 2'-O-methyl modified nucleotide
  modified_base 92: mod_base = OTHER; note = 2'-O-methyl modified nucleotide
  modified_base 93: mod_base = OTHER; note = 2'-O-methyl modified nucleotide
  modified_base 94: mod_base = OTHER; note = 2'-O-methyl modified nucleotide
  modified_base 95: mod_base = OTHER; note = 2'-O-methyl modified nucleotide
  modified_base 96: mod_base = OTHER; note = 2'-O-methyl modified nucleotide
  modified_base 97: mod_base = OTHER; note = 2'-O-methyl modified nucleotide with phosphorothioate linkage
  modified_base 98: mod_base = OTHER; note = 2'-O-methyl modified nucleotide with phosphorothioate linkage
  modified_base 99: mod_base = OTHER; note = 2'-O-methyl modified nucleotide with phosphorothioate linkage
  modified_base 100: mod_base = OTHER; note = 2'-O-methyl modified nucleotide
  misc_difference 97..100: note = This region may encompass 0-4 nucleotides

SEQ ID NO: 2380 - RNA, 100 nt, synthetic construct; identical to SEQ ID NO: 1380
  source 1..100: mol_type = other RNA
  modified_base 1: mod_base = OTHER; note = 2'-O-methyl modified nucleotide with phosphorothioate linkage
  modified_base 2: mod_base = OTHER; note = 2'-O-methyl modified nucleotide with phosphorothioate linkage
  modified_base 3: mod_base = OTHER; note = 2'-O-methyl modified nucleotide with phosphorothioate linkage
  modified_base 29: mod_base = OTHER; note = 2'-O-methyl modified nucleotide
  modified_base 30: mod_base = OTHER; note = 2'-O-methyl modified nucleotide
  modified_base 31: mod_base = OTHER; note = 2'-O-methyl modified nucleotide
  modified_base 32: mod_base = OTHER; note = 2'-O-methyl modified nucleotide
  modified_base 33: mod_base = OTHER; note = 2'-O-methyl modified nucleotide
  modified_base 34: mod_base = OTHER; note = 2'-O-methyl modified nucleotide
  modified_base 35: mod_base = OTHER; note = 2'-O-methyl modified nucleotide
  modified_base 36: mod_base = OTHER; note = 2'-O-methyl modified nucleotide
  modified_base 37: mod_base = OTHER; note = 2'-O-methyl modified nucleotide
  modified_base 38: mod_base = OTHER; note = 2'-O-methyl modified nucleotide
  modified_base 39: mod_base = OTHER; note = 2'-O-methyl modified nucleotide
  modified_base 40: mod_base = OTHER; note = 2'-O-methyl modified nucleotide
  modified_base 69: mod_base = OTHER; note = 2'-O-methyl modified nucleotide
  modified_base 70: mod_base = OTHER; note = 2'-O-methyl modified nucleotide
  modified_base 71: mod_base = OTHER; note = 2'-O-methyl modified nucleotide
  modified_base 72: mod_base = OTHER; note = 2'-O-methyl modified nucleotide
  modified_base 73: mod_base = OTHER; note = 2'-O-methyl modified nucleotide
  modified_base 74: mod_base = OTHER; note = 2'-O-methyl modified nucleotide
  modified_base 75: mod_base = OTHER; note = 2'-O-methyl modified nucleotide
  modified_base 76: mod_base = OTHER; note = 2'-O-methyl modified nucleotide
  modified_base 77: mod_base = OTHER; note = 2'-O-methyl modified nucleotide
  modified_base 78: mod_base = OTHER; note = 2'-O-methyl modified nucleotide
  modified_base 79: mod_base = OTHER; note = 2'-O-methyl modified nucleotide
  modified_base 80: mod_base = OTHER; note = 2'-O-methyl modified nucleotide
  modified_base 81: mod_base = OTHER; note = 2'-O-methyl modified nucleotide
  modified_base 82: mod_base = OTHER; note = 2'-O-methyl modified nucleotide
  modified_base 83: mod_base = OTHER; note = 2'-O-methyl modified nucleotide
  modified_base 84: mod_base = OTHER; note = 2'-O-methyl modified nucleotide
  modified_base 85: mod_base = OTHER; note = 2'-O-methyl modified nucleotide
  modified_base 86: mod_base = OTHER; note = 2'-O-methyl modified nucleotide
  modified_base 87: mod_base = OTHER; note = 2'-O-methyl modified nucleotide
  modified_base 88: mod_base = OTHER; note = 2'-O-methyl modified nucleotide
  modified_base 89: mod_base = OTHER; note = 2'-O-methyl modified nucleotide
  modified_base 90: mod_base = OTHER; note = 2'-O-methyl modified nucleotide
  modified_base 91: mod_base = OTHER; note = 2'-O-methyl modified nucleotide
  modified_base 92: mod_base = OTHER; note = 2'-O-methyl modified nucleotide
  modified_base 93: mod_base = OTHER; note = 2'-O-methyl modified nucleotide
  modified_base 94: mod_base = OTHER; note = 2'-O-methyl modified nucleotide
  modified_base 95: mod_base = OTHER; note = 2'-O-methyl modified nucleotide
  modified_base 96: mod_base = OTHER; note = 2'-O-methyl modified nucleotide
  modified_base 97: mod_base = OTHER; note = 2'-O-methyl modified nucleotide with phosphorothioate linkage
  modified_base 98: mod_base = OTHER; note = 2'-O-methyl modified nucleotide with phosphorothioate linkage
  modified_base 99: mod_base = OTHER; note = 2'-O-methyl modified nucleotide with phosphorothioate linkage
  modified_base 100: mod_base = OTHER; note = 2'-O-methyl modified nucleotide
  misc_difference 97..100: note = This region may encompass 0-4 nucleotides

SEQ ID NO: 2381 - RNA, 100 nt, synthetic construct; identical to SEQ ID NO: 1381
  source 1..100: mol_type = other RNA
  modified_base 1: mod_base = OTHER; note = 2'-O-methyl modified nucleotide with phosphorothioate linkage
  modified_base 2: mod_base = OTHER; note = 2'-O-methyl modified nucleotide with phosphorothioate linkage
  modified_base 3: mod_base = OTHER; note = 2'-O-methyl modified nucleotide with phosphorothioate linkage
  modified_base 29: mod_base = OTHER; note = 2'-O-methyl modified nucleotide
  modified_base 30: mod_base = OTHER; note = 2'-O-methyl modified nucleotide
  modified_base 31: mod_base = OTHER; note = 2'-O-methyl modified nucleotide
  modified_base 32: mod_base = OTHER; note = 2'-O-methyl modified nucleotide
  modified_base 33: mod_base = OTHER; note = 2'-O-methyl modified nucleotide
  modified_base 34: mod_base = OTHER; note = 2'-O-methyl modified nucleotide
  modified_base 35: mod_base = OTHER; note = 2'-O-methyl modified nucleotide
  modified_base 36: mod_base = OTHER; note = 2'-O-methyl modified nucleotide
  modified_base 37: mod_base = OTHER; note = 2'-O-methyl modified nucleotide
  modified_base 38: mod_base = OTHER; note = 2'-O-methyl modified nucleotide
  modified_base 39: mod_base = OTHER; note = 2'-O-methyl modified nucleotide
  modified_base 40: mod_base = OTHER; note = 2'-O-methyl modified nucleotide
  modified_base 69: mod_base = OTHER; note = 2'-O-methyl modified nucleotide
  modified_base 70: mod_base = OTHER; note = 2'-O-methyl modified nucleotide
  modified_base 71: mod_base = OTHER; note = 2'-O-methyl modified nucleotide
  modified_base 72: mod_base = OTHER; note = 2'-O-methyl modified nucleotide
  modified_base 73: mod_base = OTHER; note = 2'-O-methyl modified nucleotide
  modified_base 74: mod_base = OTHER; note = 2'-O-methyl modified nucleotide
  modified_base 75: mod_base = OTHER; note = 2'-O-methyl modified nucleotide
  modified_base 76: mod_base = OTHER; note = 2'-O-methyl modified nucleotide
  modified_base 77: mod_base = OTHER; note = 2'-O-methyl modified nucleotide
  modified_base 78: mod_base = OTHER; note = 2'-O-methyl modified nucleotide
  modified_base 79: mod_base = OTHER; note = 2'-O-methyl modified nucleotide
  modified_base 80: mod_base = OTHER; note = 2'-O-methyl modified nucleotide
  modified_base 81: mod_base = OTHER; note = 2'-O-methyl modified nucleotide
  modified_base 82: mod_base = OTHER; note = 2'-O-methyl modified nucleotide
  modified_base 83: mod_base = OTHER; note = 2'-O-methyl modified nucleotide
  modified_base 84: mod_base = OTHER; note = 2'-O-methyl modified nucleotide
  modified_base 85: mod_base = OTHER; note = 2'-O-methyl modified nucleotide
  modified_base 86: mod_base = OTHER; note = 2'-O-methyl modified nucleotide
  modified_base 87: mod_base = OTHER; note = 2'-O-methyl modified nucleotide
  modified_base 88: mod_base = OTHER; note = 2'-O-methyl modified nucleotide
  modified_base 89: mod_base = OTHER; note = 2'-O-methyl modified nucleotide
  modified_base 90: mod_base = OTHER; note = 2'-O-methyl modified nucleotide
  modified_base 91: mod_base = OTHER; note = 2'-O-methyl modified nucleotide
  modified_base 92: mod_base = OTHER; note = 2'-O-methyl modified nucleotide
  modified_base 93: mod_base = OTHER; note = 2'-O-methyl modified nucleotide
  modified_base 94: mod_base = OTHER; note = 2'-O-methyl modified nucleotide
  modified_base 95: mod_base = OTHER; note = 2'-O-methyl modified nucleotide
  modified_base 96: mod_base = OTHER; note = 2'-O-methyl modified nucleotide
  modified_base 97: mod_base = OTHER; note = 2'-O-methyl modified nucleotide with phosphorothioate linkage
  modified_base 98: mod_base = OTHER; note = 2'-O-methyl modified nucleotide with phosphorothioate linkage
  modified_base 99: mod_base = OTHER; note = 2'-O-methyl modified nucleotide with phosphorothioate linkage
  modified_base 100: mod_base = OTHER; note = 2'-O-methyl modified nucleotide
  misc_difference 97..100: note = This region may encompass 0-4 nucleotides

SEQ ID NO: 2382 - RNA, 100 nt, synthetic construct; identical to SEQ ID NO: 1382
  source 1..100: mol_type = other RNA
  modified_base 1: mod_base = OTHER; note = 2'-O-methyl modified nucleotide with phosphorothioate linkage
  modified_base 2: mod_base = OTHER; note = 2'-O-methyl modified nucleotide with phosphorothioate linkage
  modified_base 3: mod_base = OTHER; note = 2'-O-methyl modified nucleotide with phosphorothioate linkage
  modified_base 29: mod_base = OTHER; note = 2'-O-methyl modified nucleotide
  modified_base 30: mod_base = OTHER; note = 2'-O-methyl modified nucleotide
  modified_base 31: mod_base = OTHER; note = 2'-O-methyl modified nucleotide
  modified_base 32: mod_base = OTHER; note = 2'-O-methyl modified nucleotide
  modified_base 33: mod_base = OTHER; note = 2'-O-methyl modified nucleotide
  modified_base 34: mod_base = OTHER; note = 2'-O-methyl modified nucleotide
  modified_base 35: mod_base = OTHER; note = 2'-O-methyl modified nucleotide
  modified_base 36: mod_base = OTHER; note = 2'-O-methyl modified nucleotide
  modified_base 37: mod_base = OTHER; note = 2'-O-methyl modified nucleotide
  modified_base 38: mod_base = OTHER; note = 2'-O-methyl modified nucleotide
  modified_base 39: mod_base = OTHER; note = 2'-O-methyl modified nucleotide
  modified_base 40: mod_base = OTHER; note = 2'-O-methyl modified nucleotide
  modified_base 69: mod_base = OTHER; note = 2'-O-methyl modified nucleotide
  modified_base 70: mod_base = OTHER; note = 2'-O-methyl modified nucleotide
  modified_base 71: mod_base = OTHER; note = 2'-O-methyl modified nucleotide
  modified_base 72: mod_base = OTHER; note = 2'-O-methyl modified nucleotide
  modified_base 73: mod_base = OTHER; note = 2'-O-methyl modified nucleotide
  modified_base 74: mod_base = OTHER; note = 2'-O-methyl modified nucleotide
  modified_base 75: mod_base = OTHER; note = 2'-O-methyl modified nucleotide
  modified_base 76: mod_base = OTHER; note = 2'-O-methyl modified nucleotide
  modified_base 77: mod_base = OTHER; note = 2'-O-methyl modified nucleotide
  modified_base 78: mod_base = OTHER; note = 2'-O-methyl modified nucleotide
  modified_base 79: mod_base = OTHER; note = 2'-O-methyl modified nucleotide
  modified_base 80: mod_base = OTHER; note = 2'-O-methyl modified nucleotide
  modified_base 81: mod_base = OTHER; note = 2'-O-methyl modified nucleotide
  modified_base 82: mod_base = OTHER; note = 2'-O-methyl modified nucleotide
  modified_base 83: mod_base = OTHER; note = 2'-O-methyl modified nucleotide
  modified_base 84: mod_base = OTHER; note = 2'-O-methyl modified nucleotide
  modified_base 85: mod_base = OTHER; note = 2'-O-methyl modified nucleotide
  modified_base 86: mod_base = OTHER; note = 2'-O-methyl modified nucleotide
  modified_base 87: mod_base = OTHER; note = 2'-O-methyl modified nucleotide
  modified_base 88: mod_base = OTHER; note = 2'-O-methyl modified nucleotide
  modified_base 89: mod_base = OTHER; note = 2'-O-methyl modified nucleotide
  modified_base 90: mod_base = OTHER; note = 2'-O-methyl modified nucleotide
  modified_base 91: mod_base = OTHER; note = 2'-O-methyl modified nucleotide
  modified_base 92: mod_base = OTHER; note = 2'-O-methyl modified nucleotide
  modified_base 93: mod_base = OTHER; note = 2'-O-methyl modified nucleotide
  modified_base 94: mod_base = OTHER; note = 2'-O-methyl modified nucleotide
  modified_base 95: mod_base = OTHER; note = 2'-O-methyl modified nucleotide
  modified_base 96: mod_base = OTHER; note = 2'-O-methyl modified nucleotide
  modified_base 97: mod_base = OTHER; note = 2'-O-methyl modified nucleotide with phosphorothioate linkage
  modified_base 98: mod_base = OTHER; note = 2'-O-methyl modified nucleotide with phosphorothioate linkage
  modified_base 99: mod_base = OTHER; note = 2'-O-methyl modified nucleotide with phosphorothioate linkage
  modified_base 100: mod_base = OTHER; note = 2'-O-methyl modified nucleotide
  misc_difference 97..100: note = This region may encompass 0-4 nucleotides

SEQ ID NO: 2383 - RNA, 100 nt, synthetic construct; identical to SEQ ID NO: 1383
  source 1..100: mol_type = other RNA
  modified_base 1: mod_base = OTHER; note = 2'-O-methyl modified nucleotide with phosphorothioate linkage
  modified_base 2: mod_base = OTHER; note = 2'-O-methyl modified nucleotide with phosphorothioate linkage
  modified_base 3: mod_base = OTHER; note = 2'-O-methyl modified nucleotide with phosphorothioate linkage
  modified_base 29: mod_base = OTHER; note = 2'-O-methyl modified nucleotide
  modified_base 30: mod_base = OTHER; note = 2'-O-methyl modified nucleotide
  modified_base 31: mod_base = OTHER; note = 2'-O-methyl modified nucleotide
  modified_base 32: mod_base = OTHER; note = 2'-O-methyl modified nucleotide
  modified_base 33: mod_base = OTHER; note = 2'-O-methyl modified nucleotide
  modified_base 34: mod_base = OTHER; note = 2'-O-methyl modified nucleotide
  modified_base 35: mod_base = OTHER; note = 2'-O-methyl modified nucleotide
  modified_base 36: mod_base = OTHER; note = 2'-O-methyl modified nucleotide
  modified_base 37: mod_base = OTHER; note = 2'-O-methyl modified nucleotide
  modified_base 38: mod_base = OTHER; note = 2'-O-methyl modified nucleotide
  modified_base 39: mod_base = OTHER; note = 2'-O-methyl modified nucleotide
  modified_base 40: mod_base = OTHER; note = 2'-O-methyl modified nucleotide
  modified_base 69: mod_base = OTHER; note = 2'-O-methyl modified nucleotide
  modified_base 70: mod_base = OTHER; note = 2'-O-methyl modified nucleotide
  modified_base 71: mod_base = OTHER; note = 2'-O-methyl modified nucleotide
  modified_base 72: mod_base = OTHER; note = 2'-O-methyl modified nucleotide
  modified_base 73: mod_base = OTHER; note = 2'-O-methyl modified nucleotide
  modified_base 74: mod_base = OTHER; note = 2'-O-methyl modified nucleotide
  modified_base 75: mod_base = OTHER; note = 2'-O-methyl modified nucleotide
  modified_base 76: mod_base = OTHER; note = 2'-O-methyl modified nucleotide
  modified_base 77: mod_base = OTHER; note = 2'-O-methyl modified nucleotide
  modified_base 78: mod_base = OTHER; note = 2'-O-methyl modified nucleotide
  modified_base 79: mod_base = OTHER; note = 2'-O-methyl modified nucleotide
  modified_base 80: mod_base = OTHER; note = 2'-O-methyl modified nucleotide
  modified_base 81: mod_base = OTHER; note = 2'-O-methyl modified nucleotide
  modified_base 82: mod_base = OTHER; note = 2'-O-methyl modified nucleotide
  modified_base 83: mod_base = OTHER; note = 2'-O-methyl modified nucleotide
  modified_base 84: mod_base = OTHER; note = 2'-O-methyl modified nucleotide
  modified_base 85: mod_base = OTHER; note = 2'-O-methyl modified nucleotide
  modified_base 86: mod_base = OTHER; note = 2'-O-methyl modified nucleotide
  modified_base 87: mod_base = OTHER; note = 2'-O-methyl modified nucleotide
  modified_base 88: mod_base = OTHER; note = 2'-O-methyl modified nucleotide
  modified_base 89: mod_base = OTHER; note = 2'-O-methyl modified nucleotide
  modified_base 90: mod_base = OTHER; note = 2'-O-methyl modified nucleotide
  modified_base 91: mod_base = OTHER; note = 2'-O-methyl modified nucleotide
  modified_base 92: mod_base = OTHER; note = 2'-O-methyl modified nucleotide
  modified_base 93: mod_base = OTHER; note = 2'-O-methyl modified nucleotide
  modified_base 94: mod_base = OTHER; note = 2'-O-methyl modified nucleotide
  modified_base 95: mod_base = OTHER; note = 2'-O-methyl modified nucleotide
  modified_base 96: mod_base = OTHER; note = 2'-O-methyl modified nucleotide
  modified_base 97: mod_base = OTHER; note = 2'-O-methyl modified nucleotide with phosphorothioate linkage
  modified_base 98: mod_base = OTHER; note = 2'-O-methyl modified nucleotide with phosphorothioate linkage
  modified_base 99: mod_base = OTHER; note = 2'-O-methyl modified nucleotide with phosphorothioate linkage
  modified_base 100: mod_base = OTHER; note = 2'-O-methyl modified nucleotide
  misc_difference 97..100: note = This region may encompass 0-4 nucleotides

SEQ ID NO: 2384 - RNA, 100 nt, synthetic construct; identical to SEQ ID NO: 1384
  source 1..100: mol_type = other RNA
  modified_base 1: mod_base = OTHER; note = 2'-O-methyl modified nucleotide with phosphorothioate linkage
  modified_base 2: mod_base = OTHER; note = 2'-O-methyl modified nucleotide with phosphorothioate linkage
  modified_base 3: mod_base = OTHER; note = 2'-O-methyl modified nucleotide with phosphorothioate linkage
  modified_base 29: mod_base = OTHER; note = 2'-O-methyl modified nucleotide
  modified_base 30: mod_base = OTHER; note = 2'-O-methyl modified nucleotide
  modified_base 31: mod_base = OTHER; note = 2'-O-methyl modified nucleotide
  modified_base 32: mod_base = OTHER; note = 2'-O-methyl modified nucleotide
  modified_base 33: mod_base = OTHER; note = 2'-O-methyl modified nucleotide
  modified_base 34: mod_base = OTHER; note = 2'-O-methyl modified nucleotide
  modified_base 35: mod_base = OTHER; note = 2'-O-methyl modified nucleotide
  modified_base 36: mod_base = OTHER; note = 2'-O-methyl modified nucleotide
  modified_base 37: mod_base = OTHER; note = 2'-O-methyl modified nucleotide
  modified_base 38: mod_base = OTHER; note = 2'-O-methyl modified nucleotide
  modified_base 39: mod_base = OTHER; note = 2'-O-methyl modified nucleotide
  modified_base 40: mod_base = OTHER; note = 2'-O-methyl modified nucleotide
  modified_base 69: mod_base = OTHER; note = 2'-O-methyl modified nucleotide
  modified_base 70: mod_base = OTHER; note = 2'-O-methyl modified nucleotide
  modified_base 71: mod_base = OTHER; note = 2'-O-methyl modified nucleotide
  modified_base 72: mod_base = OTHER; note = 2'-O-methyl modified nucleotide
  modified_base 73: mod_base = OTHER; note = 2'-O-methyl modified nucleotide
  modified_base 74: mod_base = OTHER; note = 2'-O-methyl modified nucleotide
  modified_base 75: mod_base = OTHER; note = 2'-O-methyl modified nucleotide
  modified_base 76: mod_base = OTHER; note = 2'-O-methyl modified nucleotide
  modified_base 77: mod_base = OTHER; note = 2'-O-methyl modified nucleotide
  modified_base 78: mod_base = OTHER; note = 2'-O-methyl modified nucleotide
  modified_base 79: mod_base = OTHER; note = 2'-O-methyl modified nucleotide
  modified_base 80: mod_base = OTHER; note = 2'-O-methyl modified nucleotide
  modified_base 81: mod_base = OTHER; note = 2'-O-methyl modified nucleotide
  modified_base 82: mod_base = OTHER; note = 2'-O-methyl modified nucleotide
  modified_base 83: mod_base = OTHER; note = 2'-O-methyl modified nucleotide
  modified_base 84: mod_base = OTHER; note = 2'-O-methyl modified nucleotide
  modified_base 85: mod_base = OTHER; note = 2'-O-methyl modified nucleotide
  modified_base 86: mod_base = OTHER; note = 2'-O-methyl modified nucleotide
  modified_base 87: mod_base = OTHER; note = 2'-O-methyl modified nucleotide
  modified_base 88: mod_base = OTHER; note = 2'-O-methyl modified nucleotide
  modified_base 89: mod_base = OTHER; note = 2'-O-methyl modified nucleotide
  modified_base 90: mod_base = OTHER; note = 2'-O-methyl modified nucleotide
  modified_base 91: mod_base = OTHER; note = 2'-O-methyl modified nucleotide
  modified_base 92: mod_base = OTHER; note = 2'-O-methyl modified nucleotide
  modified_base 93: mod_base = OTHER; note = 2'-O-methyl modified nucleotide
  modified_base 94: mod_base = OTHER; note = 2'-O-methyl modified nucleotide
  modified_base 95: mod_base = OTHER; note = 2'-O-methyl modified nucleotide
  modified_base 96: mod_base = OTHER; note = 2'-O-methyl modified nucleotide
  modified_base 97: mod_base = OTHER; note = 2'-O-methyl modified nucleotide with phosphorothioate linkage
  modified_base 98: mod_base = OTHER; note = 2'-O-methyl modified nucleotide with phosphorothioate linkage
  modified_base 99: mod_base = OTHER; note = 2'-O-methyl modified nucleotide with phosphorothioate linkage
  modified_base 100: mod_base = OTHER; note = 2'-O-methyl modified nucleotide
  misc_difference 97..100: note = This region may encompass 0-4 nucleotides

SEQ ID NO: 2385 - RNA, 100 nt, synthetic construct; identical to SEQ ID NO: 1385
  source 1..100: mol_type = other RNA
  modified_base 1: mod_base = OTHER; note = 2'-O-methyl modified nucleotide with phosphorothioate linkage
  modified_base 2: mod_base = OTHER; note = 2'-O-methyl modified nucleotide with phosphorothioate linkage
  modified_base 3: mod_base = OTHER; note = 2'-O-methyl modified nucleotide with phosphorothioate linkage
  modified_base 29: mod_base = OTHER; note = 2'-O-methyl modified nucleotide
  modified_base 30: mod_base = OTHER; note = 2'-O-methyl modified nucleotide
  modified_base 31: mod_base = OTHER; note = 2'-O-methyl modified nucleotide
  modified_base 32: mod_base = OTHER; note = 2'-O-methyl modified nucleotide
  modified_base 33: mod_base = OTHER; note = 2'-O-methyl modified nucleotide
  modified_base 34: mod_base = OTHER; note = 2'-O-methyl modified nucleotide
  modified_base 35: mod_base = OTHER; note = 2'-O-methyl modified nucleotide
  modified_base 36: mod_base = OTHER; note = 2'-O-methyl modified nucleotide
  modified_base 37: mod_base = OTHER; note = 2'-O-methyl modified nucleotide
  modified_base 38: mod_base = OTHER; note = 2'-O-methyl modified nucleotide
  modified_base 39: mod_base = OTHER; note = 2'-O-methyl modified nucleotide
  modified_base 40: mod_base = OTHER; note = 2'-O-methyl modified nucleotide
  modified_base 69: mod_base = OTHER; note = 2'-O-methyl modified nucleotide
  modified_base 70: mod_base = OTHER; note = 2'-O-methyl modified nucleotide
  modified_base 71: mod_base = OTHER; note = 2'-O-methyl modified nucleotide
  modified_base 72: mod_base = OTHER; note = 2'-O-methyl modified nucleotide
  modified_base 73: mod_base = OTHER; note = 2'-O-methyl modified nucleotide
  modified_base 74: mod_base = OTHER; note = 2'-O-methyl modified nucleotide
  modified_base 75: mod_base = OTHER; note = 2'-O-methyl modified nucleotide
  modified_base 76: mod_base = OTHER; note = 2'-O-methyl modified nucleotide
  modified_base 77: mod_base = OTHER; note = 2'-O-methyl modified nucleotide
  modified_base 78: mod_base = OTHER; note = 2'-O-methyl modified nucleotide
  modified_base 79: mod_base = OTHER; note = 2'-O-methyl modified nucleotide
  modified_base 80: mod_base = OTHER; note = 2'-O-methyl modified nucleotide
  modified_base 81: mod_base = OTHER; note = 2'-O-methyl modified nucleotide
  modified_base 82: mod_base = OTHER; note = 2'-O-methyl modified nucleotide
  modified_base 83: mod_base = OTHER; note = 2'-O-methyl modified nucleotide
  modified_base 84: mod_base = OTHER; note = 2'-O-methyl modified nucleotide
  modified_base 85: mod_base = OTHER; note = 2'-O-methyl modified nucleotide
  modified_base 86: mod_base = OTHER; note = 2'-O-methyl modified nucleotide
  modified_base 87: mod_base = OTHER; note = 2'-O-methyl modified nucleotide
  modified_base 88: mod_base = OTHER; note = 2'-O-methyl modified nucleotide
  modified_base 89: mod_base = OTHER; note = 2'-O-methyl modified nucleotide
  modified_base 90: mod_base = OTHER; note = 2'-O-methyl modified nucleotide
  modified_base 91: mod_base = OTHER; note = 2'-O-methyl modified nucleotide
  modified_base 92: mod_base = OTHER; note = 2'-O-methyl modified nucleotide
  modified_base 93: mod_base = OTHER; note = 2'-O-methyl modified nucleotide
  modified_base 94: mod_base = OTHER; note = 2'-O-methyl modified nucleotide
  modified_base 95: mod_base = OTHER; note = 2'-O-methyl modified nucleotide
  modified_base 96: mod_base = OTHER; note = 2'-O-methyl modified nucleotide
  modified_base 97: mod_base = OTHER; note = 2'-O-methyl modified nucleotide with phosphorothioate linkage
  modified_base 98: mod_base = OTHER; note = 2'-O-methyl modified nucleotide with phosphorothioate linkage
  modified_base 99: mod_base = OTHER; note = 2'-O-methyl modified nucleotide with phosphorothioate linkage
  modified_base 100: mod_base = OTHER; note = 2'-O-methyl modified nucleotide
  misc_difference 97..100: note = This region may encompass 0-4 nucleotides

SEQ ID NO: 2386 - RNA, 100 nt, synthetic construct; identical to SEQ ID NO: 1386
  source 1..100: mol_type = other RNA
  modified_base 1: mod_base = OTHER; note = 2'-O-methyl modified nucleotide with phosphorothioate linkage
  modified_base 2: mod_base = OTHER; note = 2'-O-methyl modified nucleotide with phosphorothioate linkage
  modified_base 3: mod_base = OTHER; note = 2'-O-methyl modified nucleotide with phosphorothioate linkage
  modified_base 29: mod_base = OTHER; note = 2'-O-methyl modified nucleotide
  modified_base 30: mod_base = OTHER; note = 2'-O-methyl modified nucleotide
  modified_base 31: mod_base = OTHER; note = 2'-O-methyl modified nucleotide
  modified_base 32: mod_base = OTHER; note = 2'-O-methyl modified nucleotide
  modified_base 33: mod_base = OTHER; note = 2'-O-methyl modified nucleotide
  modified_base 34: mod_base = OTHER; note = 2'-O-methyl modified nucleotide
  modified_base 35: mod_base = OTHER; note = 2'-O-methyl modified nucleotide
  modified_base 36: mod_base = OTHER; note = 2'-O-methyl modified nucleotide
  modified_base 37: mod_base = OTHER; note = 2'-O-methyl modified nucleotide
  modified_base 38: mod_base = OTHER; note = 2'-O-methyl modified nucleotide
  modified_base 39: mod_base = OTHER; note = 2'-O-methyl modified nucleotide
  modified_base 40: mod_base = OTHER; note = 2'-O-methyl modified nucleotide
  modified_base 69: mod_base = OTHER; note = 2'-O-methyl modified nucleotide
  modified_base 70: mod_base = OTHER; note = 2'-O-methyl modified nucleotide
  modified_base 71: mod_base = OTHER; note = 2'-O-methyl modified nucleotide
  modified_base 72: mod_base = OTHER; note = 2'-O-methyl modified nucleotide
  modified_base 73: mod_base = OTHER; note = 2'-O-methyl modified nucleotide
  modified_base 74: mod_base = OTHER; note = 2'-O-methyl modified nucleotide
  modified_base 75: mod_base = OTHER; note = 2'-O-methyl modified nucleotide
  modified_base 76: mod_base = OTHER; note = 2'-O-methyl modified nucleotide
  modified_base 77: mod_base = OTHER; note = 2'-O-methyl modified nucleotide
  modified_base 78: mod_base = OTHER; note = 2'-O-methyl modified nucleotide
  modified_base 79: mod_base = OTHER; note = 2'-O-methyl modified nucleotide
  modified_base 80: mod_base = OTHER; note = 2'-O-methyl modified nucleotide
  modified_base 81: mod_base = OTHER; note = 2'-O-methyl modified nucleotide
  modified_base 82: mod_base = OTHER; note = 2'-O-methyl modified nucleotide
  modified_base 83: mod_base = OTHER; note = 2'-O-methyl modified nucleotide
  modified_base 84: mod_base = OTHER; note = 2'-O-methyl modified nucleotide
  modified_base 85: mod_base = OTHER; note = 2'-O-methyl modified nucleotide
  modified_base 86: mod_base = OTHER; note = 2'-O-methyl modified nucleotide
  modified_base 87: mod_base = OTHER; note = 2'-O-methyl modified nucleotide
  modified_base 88: mod_base = OTHER; note = 2'-O-methyl modified nucleotide
  modified_base 89: mod_base = OTHER; note = 2'-O-methyl modified nucleotide
  modified_base 90: mod_base = OTHER; note = 2'-O-methyl modified nucleotide
  modified_base 91: mod_base = OTHER; note = 2'-O-methyl modified nucleotide
  modified_base 92: mod_base = OTHER; note = 2'-O-methyl modified nucleotide
  modified_base 93: mod_base = OTHER; note = 2'-O-methyl modified nucleotide
  modified_base 94: mod_base = OTHER; note = 2'-O-methyl modified nucleotide
  modified_base 95: mod_base = OTHER; note = 2'-O-methyl modified nucleotide
  modified_base 96: mod_base = OTHER; note = 2'-O-methyl modified nucleotide
  modified_base 97: mod_base = OTHER; note = 2'-O-methyl modified nucleotide with phosphorothioate linkage
  modified_base 98: mod_base = OTHER; note = 2'-O-methyl modified nucleotide with phosphorothioate linkage
  modified_base 99: mod_base = OTHER; note = 2'-O-methyl modified nucleotide with phosphorothioate linkage
  modified_base 100: mod_base = OTHER; note = 2'-O-methyl modified nucleotide
  misc_difference 97..100: note = This region may encompass 0-4 nucleotides

SEQ ID NO: 2387 - RNA, 100 nt, synthetic construct; identical to SEQ ID NO: 1387
  source 1..100: mol_type = other RNA
  modified_base 1: mod_base = OTHER; note = 2'-O-methyl modified nucleotide with phosphorothioate linkage
  modified_base 2: mod_base = OTHER; note = 2'-O-methyl modified nucleotide with phosphorothioate linkage
  modified_base 3: mod_base = OTHER; note = 2'-O-methyl modified nucleotide with phosphorothioate linkage
  modified_base 29: mod_base = OTHER; note = 2'-O-methyl modified nucleotide
  modified_base 30: mod_base = OTHER; note = 2'-O-methyl modified nucleotide
  modified_base 31: mod_base = OTHER; note = 2'-O-methyl modified nucleotide
  modified_base 32: mod_base = OTHER; note = 2'-O-methyl modified nucleotide
  modified_base 33: mod_base = OTHER; note = 2'-O-methyl modified nucleotide
  modified_base 34: mod_base = OTHER; note = 2'-O-methyl modified nucleotide
  modified_base 35: mod_base = OTHER; note = 2'-O-methyl modified nucleotide
  modified_base 36: mod_base = OTHER; note = 2'-O-methyl modified nucleotide
  modified_base 37: mod_base = OTHER; note = 2'-O-methyl modified nucleotide
  modified_base 38: mod_base = OTHER; note = 2'-O-methyl modified nucleotide
  modified_base 39: mod_base = OTHER; note = 2'-O-methyl modified nucleotide
  modified_base 40: mod_base = OTHER; note = 2'-O-methyl modified nucleotide
  modified_base 69: mod_base = OTHER; note = 2'-O-methyl modified nucleotide
  modified_base 70: mod_base = OTHER; note = 2'-O-methyl modified nucleotide
  modified_base 71: mod_base = OTHER; note = 2'-O-methyl modified nucleotide
  modified_base 72: mod_base = OTHER; note = 2'-O-methyl modified nucleotide
  modified_base 73: mod_base = OTHER; note = 2'-O-methyl modified nucleotide
  modified_base 74: mod_base = OTHER; note = 2'-O-methyl modified nucleotide
  modified_base 75: mod_base = OTHER; note = 2'-O-methyl modified nucleotide
  modified_base 76: mod_base = OTHER; note = 2'-O-methyl modified nucleotide
  modified_base 77: mod_base = OTHER; note = 2'-O-methyl modified nucleotide
  modified_base 78: mod_base = OTHER; note = 2'-O-methyl modified nucleotide
  modified_base 79: mod_base = OTHER; note = 2'-O-methyl modified nucleotide
  modified_base 80: mod_base = OTHER; note = 2'-O-methyl modified nucleotide
  modified_base 81: mod_base = OTHER; note = 2'-O-methyl modified nucleotide
  modified_base 82: mod_base = OTHER; note = 2'-O-methyl modified nucleotide
  modified_base 83: mod_base = OTHER; note = 2'-O-methyl modified nucleotide
  modified_base 84: mod_base = OTHER; note = 2'-O-methyl modified nucleotide
  modified_base 85: mod_base = OTHER; note = 2'-O-methyl modified nucleotide
  modified_base 86: mod_base = OTHER; note = 2'-O-methyl modified nucleotide
  modified_base 87: mod_base = OTHER; note = 2'-O-methyl modified nucleotide
  modified_base 88: mod_base = OTHER; note = 2'-O-methyl modified nucleotide
  modified_base 89: mod_base = OTHER; note = 2'-O-methyl modified nucleotide
  modified_base 90: mod_base = OTHER; note = 2'-O-methyl modified nucleotide
  modified_base 91: mod_base = OTHER; note = 2'-O-methyl modified nucleotide
  modified_base 92: mod_base = OTHER; note = 2'-O-methyl modified nucleotide
  modified_base 93: mod_base = OTHER; note = 2'-O-methyl modified nucleotide
  modified_base 94: mod_base = OTHER; note = 2'-O-methyl modified nucleotide
  modified_base 95: mod_base = OTHER; note = 2'-O-methyl modified nucleotide
  modified_base 96: mod_base = OTHER; note = 2'-O-methyl modified nucleotide
  modified_base 97: mod_base = OTHER; note = 2'-O-methyl modified nucleotide with phosphorothioate linkage
  modified_base 98: mod_base = OTHER; note = 2'-O-methyl modified nucleotide with phosphorothioate linkage
  modified_base 99: mod_base = OTHER; note = 2'-O-methyl modified nucleotide with phosphorothioate linkage
  modified_base 100: mod_base = OTHER; note = 2'-O-methyl modified nucleotide
  misc_difference 97..100: note = This region may encompass 0-4 nucleotides

SEQ ID NO: 2388 - RNA, 100 nt, synthetic construct; identical to SEQ ID NO: 1388
  source 1..100: mol_type = other RNA
  modified_base 1: mod_base = OTHER; note = 2'-O-methyl modified nucleotide with phosphorothioate linkage
  modified_base 2: mod_base = OTHER; note = 2'-O-methyl modified nucleotide with phosphorothioate linkage
  modified_base 3: mod_base = OTHER; note = 2'-O-methyl modified nucleotide with phosphorothioate linkage
  modified_base 29: mod_base = OTHER; note = 2'-O-methyl modified nucleotide
  modified_base 30: mod_base = OTHER; note = 2'-O-methyl modified nucleotide
  modified_base 31: mod_base = OTHER; note = 2'-O-methyl modified nucleotide
  modified_base 32: mod_base = OTHER; note = 2'-O-methyl modified nucleotide
  modified_base 33: mod_base = OTHER; note = 2'-O-methyl modified nucleotide
  modified_base 34: mod_base = OTHER; note = 2'-O-methyl modified nucleotide
  modified_base 35: mod_base = OTHER; note = 2'-O-methyl modified nucleotide
  modified_base 36: mod_base = OTHER; note = 2'-O-methyl modified nucleotide
  modified_base 37: mod_base = OTHER; note = 2'-O-methyl modified nucleotide
  modified_base 38: mod_base = OTHER; note = 2'-O-methyl modified nucleotide
  modified_base 39: mod_base = OTHER; note = 2'-O-methyl modified nucleotide
  modified_base 40: mod_base = OTHER; note = 2'-O-methyl modified nucleotide
  modified_base 69: mod_base = OTHER; note = 2'-O-methyl modified nucleotide
  modified_base 70: mod_base = OTHER; note = 2'-O-methyl modified nucleotide
  modified_base 71: mod_base = OTHER; note = 2'-O-methyl modified nucleotide
  modified_base 72: mod_base = OTHER; note = 2'-O-methyl modified nucleotide
  modified_base 73: mod_base = OTHER; note = 2'-O-methyl modified nucleotide
  modified_base 74: mod_base = OTHER; note = 2'-O-methyl modified nucleotide
  modified_base 75: mod_base = OTHER; note = 2'-O-methyl modified nucleotide
  modified_base 76: mod_base = OTHER; note = 2'-O-methyl modified nucleotide
  modified_base 77: mod_base = OTHER; note = 2'-O-methyl modified nucleotide
  modified_base 78: mod_base = OTHER; note = 2'-O-methyl modified nucleotide
  modified_base 79: mod_base = OTHER; note = 2'-O-methyl modified nucleotide
  modified_base 80: mod_base = OTHER; note = 2'-O-methyl modified nucleotide
  modified_base 81: mod_base = OTHER; note = 2'-O-methyl modified nucleotide
  modified_base 82: mod_base = OTHER; note = 2'-O-methyl modified nucleotide
  modified_base 83: mod_base = OTHER; note = 2'-O-methyl modified nucleotide
  modified_base 84: mod_base = OTHER; note = 2'-O-methyl modified nucleotide
  modified_base 85: mod_base = OTHER; note = 2'-O-methyl modified nucleotide
  modified_base 86: mod_base = OTHER; note = 2'-O-methyl modified nucleotide
  modified_base 87: mod_base = OTHER; note = 2'-O-methyl modified nucleotide
  modified_base 88: mod_base = OTHER; note = 2'-O-methyl modified nucleotide
  modified_base 89: mod_base = OTHER; note = 2'-O-methyl modified nucleotide
  modified_base 90: mod_base = OTHER; note = 2'-O-methyl modified nucleotide
  modified_base 91: mod_base = OTHER; note = 2'-O-methyl modified nucleotide
  modified_base 92: mod_base = OTHER; note = 2'-O-methyl modified nucleotide
  modified_base 93: mod_base = OTHER; note = 2'-O-methyl modified nucleotide
  modified_base 94: mod_base = OTHER; note = 2'-O-methyl modified nucleotide
  modified_base 95: mod_base = OTHER; note = 2'-O-methyl modified nucleotide
  modified_base 96: mod_base = OTHER; note = 2'-O-methyl modified nucleotide
  modified_base 97: mod_base = OTHER; note = 2'-O-methyl modified nucleotide with phosphorothioate linkage
  modified_base 98: mod_base = OTHER; note = 2'-O-methyl modified nucleotide with phosphorothioate linkage
  modified_base 99: mod_base = OTHER; note = 2'-O-methyl modified nucleotide with phosphorothioate linkage
  modified_base 100: mod_base = OTHER; note = 2'-O-methyl modified nucleotide
  misc_difference 97..100: note = This region may encompass 0-4 nucleotides

SEQ ID NO: 2389 - RNA, 100 nt, synthetic construct; identical to SEQ ID NO: 1389
  source 1..100: mol_type = other RNA
  modified_base 1: mod_base = OTHER; note = 2'-O-methyl modified nucleotide with phosphorothioate linkage
  modified_base 2: mod_base = OTHER; note = 2'-O-methyl modified nucleotide with phosphorothioate linkage
  modified_base 3: mod_base = OTHER; note = 2'-O-methyl modified nucleotide with phosphorothioate linkage
  modified_base 29: mod_base = OTHER; note = 2'-O-methyl modified nucleotide
  modified_base 30: mod_base = OTHER; note = 2'-O-methyl modified nucleotide
  modified_base 31: mod_base = OTHER; note = 2'-O-methyl modified nucleotide
  modified_base 32: mod_base = OTHER; note = 2'-O-methyl modified nucleotide
  modified_base 33: mod_base = OTHER; note = 2'-O-methyl modified nucleotide
  modified_base 34: mod_base = OTHER; note = 2'-O-methyl modified nucleotide
  modified_base 35: mod_base = OTHER; note = 2'-O-methyl modified nucleotide
  modified_base 36: mod_base = OTHER; note = 2'-O-methyl modified nucleotide
  modified_base 37: mod_base = OTHER; note = 2'-O-methyl modified nucleotide
  modified_base 38: mod_base = OTHER; note = 2'-O-methyl modified nucleotide
  modified_base 39: mod_base = OTHER; note = 2'-O-methyl modified nucleotide
  modified_base 40: mod_base = OTHER; note = 2'-O-methyl modified nucleotide
  modified_base 69: mod_base = OTHER; note = 2'-O-methyl modified nucleotide
  modified_base 70: mod_base = OTHER; note = 2'-O-methyl modified nucleotide
  modified_base 71: mod_base = OTHER; note = 2'-O-methyl modified nucleotide
  modified_base 72: mod_base = OTHER; note = 2'-O-methyl modified nucleotide
  modified_base 73: mod_base = OTHER; note = 2'-O-methyl modified nucleotide
  modified_base 74: mod_base = OTHER; note = 2'-O-methyl modified nucleotide
  modified_base 75: mod_base = OTHER; note = 2'-O-methyl modified nucleotide
  modified_base 76: mod_base = OTHER; note = 2'-O-methyl modified nucleotide
  modified_base 77: mod_base = OTHER; note = 2'-O-methyl modified nucleotide
  modified_base 78: mod_base = OTHER; note = 2'-O-methyl modified nucleotide
  modified_base 79: mod_base = OTHER; note = 2'-O-methyl modified nucleotide
  modified_base 80: mod_base = OTHER; note = 2'-O-methyl modified nucleotide
  modified_base 81: mod_base = OTHER; note = 2'-O-methyl modified nucleotide
  modified_base 82: mod_base = OTHER; note = 2'-O-methyl modified nucleotide
  modified_base 83: mod_base = OTHER; note = 2'-O-methyl modified nucleotide
  modified_base 84: mod_base = OTHER; note = 2'-O-methyl modified nucleotide
  modified_base 85: mod_base = OTHER; note = 2'-O-methyl modified nucleotide
  modified_base 86: mod_base = OTHER; note = 2'-O-methyl modified nucleotide
  modified_base 87: mod_base = OTHER; note = 2'-O-methyl modified nucleotide
  modified_base 88: mod_base = OTHER; note = 2'-O-methyl modified nucleotide
  modified_base 89: mod_base = OTHER; note = 2'-O-methyl modified nucleotide
  modified_base 90: mod_base = OTHER; note = 2'-O-methyl modified nucleotide
  modified_base 91: mod_base = OTHER; note = 2'-O-methyl modified nucleotide
  modified_base 92: mod_base = OTHER; note = 2'-O-methyl modified nucleotide
  modified_base 93: mod_base = OTHER; note = 2'-O-methyl modified nucleotide
  modified_base 94: mod_base = OTHER; note = 2'-O-methyl modified nucleotide
  modified_base 95: mod_base = OTHER; note = 2'-O-methyl modified nucleotide
  modified_base 96: mod_base = OTHER; note = 2'-O-methyl modified nucleotide
  modified_base 97: mod_base = OTHER; note = 2'-O-methyl modified nucleotide with phosphorothioate linkage
  modified_base 98: mod_base = OTHER; note = 2'-O-methyl modified nucleotide with phosphorothioate linkage
  modified_base 99: mod_base = OTHER; note = 2'-O-methyl modified nucleotide with phosphorothioate linkage
  modified_base 100: mod_base = OTHER; note = 2'-O-methyl modified nucleotide
  misc_difference 97..100: note = This region may encompass 0-4 nucleotides

SEQ ID NO: 2390 - RNA, 100 nt, synthetic construct; identical to SEQ ID NO: 1390
  source 1..100: mol_type = other RNA
  modified_base 1: mod_base = OTHER; note = 2'-O-methyl modified nucleotide with phosphorothioate linkage
  modified_base 2: mod_base = OTHER; note = 2'-O-methyl modified nucleotide with phosphorothioate linkage
  modified_base 3: mod_base = OTHER; note = 2'-O-methyl modified nucleotide with phosphorothioate linkage
  modified_base 29: mod_base = OTHER; note = 2'-O-methyl modified nucleotide
  modified_base 30: mod_base = OTHER; note = 2'-O-methyl modified nucleotide
  modified_base 31: mod_base = OTHER; note = 2'-O-methyl modified nucleotide
  modified_base 32: mod_base = OTHER; note = 2'-O-methyl modified nucleotide
  modified_base 33: mod_base = OTHER; note = 2'-O-methyl modified nucleotide
  modified_base 34: mod_base = OTHER; note = 2'-O-methyl modified nucleotide
  modified_base 35: mod_base = OTHER; note = 2'-O-methyl modified nucleotide
  modified_base 36: mod_base = OTHER; note = 2'-O-methyl modified nucleotide
  modified_base 37: mod_base = OTHER; note = 2'-O-methyl modified nucleotide
  modified_base 38: mod_base = OTHER; note = 2'-O-methyl modified nucleotide
  modified_base 39: mod_base = OTHER; note = 2'-O-methyl modified nucleotide
  modified_base 40: mod_base = OTHER; note = 2'-O-methyl modified nucleotide
  modified_base 69: mod_base = OTHER; note = 2'-O-methyl modified nucleotide
  modified_base 70: mod_base = OTHER; note = 2'-O-methyl modified nucleotide
  modified_base 71: mod_base = OTHER; note = 2'-O-methyl modified nucleotide
  modified_base 72: mod_base = OTHER; note = 2'-O-methyl modified nucleotide
  modified_base 73: mod_base = OTHER; note = 2'-O-methyl modified nucleotide
  modified_base 74: mod_base = OTHER; note = 2'-O-methyl modified nucleotide
  modified_base 75: mod_base = OTHER; note = 2'-O-methyl modified nucleotide
  modified_base 76: mod_base = OTHER; note = 2'-O-methyl modified nucleotide
  modified_base 77: mod_base = OTHER; note = 2'-O-methyl modified nucleotide
  modified_base 78: mod_base = OTHER; note = 2'-O-methyl modified nucleotide
  modified_base 79: mod_base = OTHER; note = 2'-O-methyl modified nucleotide
  modified_base 80: mod_base = OTHER; note = 2'-O-methyl modified nucleotide
  modified_base 81: mod_base = OTHER; note = 2'-O-methyl modified nucleotide
  modified_base 82: mod_base = OTHER; note = 2'-O-methyl modified nucleotide
  modified_base 83: mod_base = OTHER; note = 2'-O-methyl modified nucleotide
  modified_base 84: mod_base = OTHER; note = 2'-O-methyl modified nucleotide
  modified_base 85: mod_base = OTHER; note = 2'-O-methyl modified nucleotide
  modified_base 86: mod_base = OTHER; note = 2'-O-methyl modified nucleotide
  modified_base 87: mod_base = OTHER; note = 2'-O-methyl modified nucleotide
  modified_base 88: mod_base = OTHER; note = 2'-O-methyl modified nucleotide
  modified_base 89: mod_base = OTHER; note = 2'-O-methyl modified nucleotide
  modified_base 90: mod_base = OTHER; note = 2'-O-methyl modified nucleotide
  modified_base 91: mod_base = OTHER; note = 2'-O-methyl modified nucleotide
  modified_base 92: mod_base = OTHER; note = 2'-O-methyl modified nucleotide
  modified_base 93: mod_base = OTHER; note = 2'-O-methyl modified nucleotide
  modified_base 94: mod_base = OTHER; note = 2'-O-methyl modified nucleotide
  modified_base 95: mod_base = OTHER; note = 2'-O-methyl modified nucleotide
  modified_base 96: mod_base = OTHER; note = 2'-O-methyl modified nucleotide
  modified_base 97: mod_base = OTHER; note = 2'-O-methyl modified nucleotide with phosphorothioate linkage
  modified_base 98: mod_base = OTHER; note = 2'-O-methyl modified nucleotide with phosphorothioate linkage
  modified_base 99: mod_base = OTHER; note = 2'-O-methyl modified nucleotide with phosphorothioate linkage
  modified_base 100: mod_base = OTHER; note = 2'-O-methyl modified nucleotide
  misc_difference 97..100: note = This region may encompass 0-4 nucleotides

SEQ ID NO: 2391 - RNA, 100 nt, synthetic construct; identical to SEQ ID NO: 1391
  source 1..100: mol_type = other RNA
  modified_base 1: mod_base = OTHER; note = 2'-O-methyl modified nucleotide with phosphorothioate linkage
  modified_base 2: mod_base = OTHER; note = 2'-O-methyl modified nucleotide with phosphorothioate linkage
  modified_base 3: mod_base = OTHER; note = 2'-O-methyl modified nucleotide with phosphorothioate linkage
  modified_base 29: mod_base = OTHER; note = 2'-O-methyl modified nucleotide
  modified_base 30: mod_base = OTHER; note = 2'-O-methyl modified nucleotide
  modified_base 31: mod_base = OTHER; note = 2'-O-methyl modified nucleotide
  modified_base 32: mod_base = OTHER; note = 2'-O-methyl modified nucleotide
  modified_base 33: mod_base = OTHER; note = 2'-O-methyl modified nucleotide
  modified_base 34: mod_base = OTHER; note = 2'-O-methyl modified nucleotide
  modified_base 35: mod_base = OTHER; note = 2'-O-methyl modified nucleotide
  modified_base 36: mod_base = OTHER; note = 2'-O-methyl modified nucleotide
  modified_base 37: mod_base = OTHER; note = 2'-O-methyl modified nucleotide
  modified_base 38: mod_base = OTHER; note = 2'-O-methyl modified nucleotide
  modified_base 39: mod_base = OTHER; note = 2'-O-methyl modified nucleotide
  modified_base 40: mod_base = OTHER; note = 2'-O-methyl modified nucleotide
  modified_base 69: mod_base = OTHER; note = 2'-O-methyl modified nucleotide
  modified_base 70: mod_base = OTHER; note = 2'-O-methyl modified nucleotide
  modified_base 71: mod_base = OTHER; note = 2'-O-methyl modified nucleotide
  modified_base 72: mod_base = OTHER; note = 2'-O-methyl modified nucleotide
  modified_base 73: mod_base = OTHER; note = 2'-O-methyl modified nucleotide
  modified_base 74: mod_base = OTHER; note = 2'-O-methyl modified nucleotide
  modified_base 75: mod_base = OTHER; note = 2'-O-methyl modified nucleotide
  modified_base 76: mod_base = OTHER; note = 2'-O-methyl modified nucleotide
  modified_base 77: mod_base = OTHER; note = 2'-O-methyl modified nucleotide
  modified_base 78: mod_base = OTHER; note = 2'-O-methyl modified nucleotide
  modified_base 79: mod_base = OTHER; note = 2'-O-methyl modified nucleotide
  modified_base 80: mod_base = OTHER; note = 2'-O-methyl modified nucleotide
  modified_base 81: mod_base = OTHER; note = 2'-O-methyl modified nucleotide
  modified_base 82: mod_base = OTHER; note = 2'-O-methyl modified nucleotide
  modified_base 83: mod_base = OTHER; note = 2'-O-methyl modified nucleotide
  modified_base 84: mod_base = OTHER; note = 2'-O-methyl modified nucleotide
  modified_base 85: mod_base = OTHER; note = 2'-O-methyl modified nucleotide
  modified_base 86: mod_base = OTHER; note = 2'-O-methyl modified nucleotide
  modified_base 87: mod_base = OTHER; note = 2'-O-methyl modified nucleotide
  modified_base 88: mod_base = OTHER; note = 2'-O-methyl modified nucleotide
  modified_base 89: mod_base = OTHER; note = 2'-O-methyl modified nucleotide
  modified_base 90: mod_base = OTHER; note = 2'-O-methyl modified nucleotide
  modified_base 91: mod_base = OTHER; note = 2'-O-methyl modified nucleotide
  modified_base 92: mod_base = OTHER; note = 2'-O-methyl modified nucleotide
  modified_base 93: mod_base = OTHER; note = 2'-O-methyl modified nucleotide
  modified_base 94: mod_base = OTHER; note = 2'-O-methyl modified nucleotide
  modified_base 95: mod_base = OTHER; note = 2'-O-methyl modified nucleotide
  modified_base 96: mod_base = OTHER; note = 2'-O-methyl modified nucleotide
  modified_base 97: mod_base = OTHER; note = 2'-O-methyl modified nucleotide with phosphorothioate linkage
  modified_base 98: mod_base = OTHER; note = 2'-O-methyl modified nucleotide with phosphorothioate linkage
  modified_base 99: mod_base = OTHER; note = 2'-O-methyl modified nucleotide with phosphorothioate linkage
  modified_base 100: mod_base = OTHER; note = 2'-O-methyl modified nucleotide
  misc_difference 97..100: note = This region may encompass 0-4 nucleotides

SEQ ID NO: 2392 - RNA, 100 nt, synthetic construct; identical to SEQ ID NO: 1392
  source 1..100: mol_type = other RNA
  modified_base 1: mod_base = OTHER; note = 2'-O-methyl modified nucleotide with phosphorothioate linkage
  modified_base 2: mod_base = OTHER; note = 2'-O-methyl modified nucleotide with phosphorothioate linkage
  modified_base 3: mod_base = OTHER; note = 2'-O-methyl modified nucleotide with phosphorothioate linkage
  modified_base 29: mod_base = OTHER; note = 2'-O-methyl modified nucleotide
  modified_base 30: mod_base = OTHER; note = 2'-O-methyl modified nucleotide
  modified_base 31: mod_base = OTHER; note = 2'-O-methyl modified nucleotide
  modified_base 32: mod_base = OTHER; note = 2'-O-methyl modified nucleotide
  modified_base 33: mod_base = OTHER; note = 2'-O-methyl modified nucleotide
  modified_base 34: mod_base = OTHER; note = 2'-O-methyl modified nucleotide
  modified_base 35: mod_base = OTHER; note = 2'-O-methyl modified nucleotide
  modified_base 36: mod_base = OTHER; note = 2'-O-methyl modified nucleotide
  modified_base 37: mod_base = OTHER; note = 2'-O-methyl modified nucleotide
  modified_base 38: mod_base = OTHER; note = 2'-O-methyl modified nucleotide
  modified_base 39: mod_base = OTHER; note = 2'-O-methyl modified nucleotide
  modified_base 40: mod_base = OTHER; note = 2'-O-methyl modified nucleotide
  modified_base 69: mod_base = OTHER; note = 2'-O-methyl modified nucleotide
  modified_base 70: mod_base = OTHER; note = 2'-O-methyl modified nucleotide
  modified_base 71: mod_base = OTHER; note = 2'-O-methyl modified nucleotide
  modified_base 72: mod_base = OTHER; note = 2'-O-methyl modified nucleotide
  modified_base 73: mod_base = OTHER; note = 2'-O-methyl modified nucleotide
  modified_base 74: mod_base = OTHER; note = 2'-O-methyl modified nucleotide
  modified_base 75: mod_base = OTHER; note = 2'-O-methyl modified nucleotide
  modified_base 76: mod_base = OTHER; note = 2'-O-methyl modified nucleotide
  modified_base 77: mod_base = OTHER; note = 2'-O-methyl modified nucleotide
  modified_base 78: mod_base = OTHER; note = 2'-O-methyl modified nucleotide
  modified_base 79: mod_base = OTHER; note = 2'-O-methyl modified nucleotide
  modified_base 80: mod_base = OTHER; note = 2'-O-methyl modified nucleotide
  modified_base 81: mod_base = OTHER; note = 2'-O-methyl modified nucleotide
  modified_base 82: mod_base = OTHER; note = 2'-O-methyl modified nucleotide
  modified_base 83: mod_base = OTHER; note = 2'-O-methyl modified nucleotide
  modified_base 84: mod_base = OTHER; note = 2'-O-methyl modified nucleotide
  modified_base 85: mod_base = OTHER; note = 2'-O-methyl modified nucleotide
  modified_base 86: mod_base = OTHER; note = 2'-O-methyl modified nucleotide
  modified_base 87: mod_base = OTHER; note = 2'-O-methyl modified nucleotide
  modified_base 88: mod_base = OTHER; note = 2'-O-methyl modified nucleotide
  modified_base 89: mod_base = OTHER; note = 2'-O-methyl modified nucleotide
  modified_base 90: mod_base = OTHER; note = 2'-O-methyl modified nucleotide
  modified_base 91: mod_base = OTHER; note = 2'-O-methyl modified nucleotide
  modified_base 92: mod_base = OTHER; note = 2'-O-methyl modified nucleotide
  modified_base 93: mod_base = OTHER; note = 2'-O-methyl modified nucleotide
  modified_base 94: mod_base = OTHER; note = 2'-O-methyl modified nucleotide
  modified_base 95: mod_base = OTHER; note = 2'-O-methyl modified nucleotide
  modified_base 96: mod_base = OTHER; note = 2'-O-methyl modified nucleotide
  modified_base 97: mod_base = OTHER; note = 2'-O-methyl modified nucleotide with phosphorothioate linkage
  modified_base 98: mod_base = OTHER; note = 2'-O-methyl modified nucleotide with phosphorothioate linkage
  modified_base 99: mod_base = OTHER; note = 2'-O-methyl modified nucleotide with phosphorothioate linkage
  modified_base 100: mod_base = OTHER; note = 2'-O-methyl modified nucleotide
  misc_difference 97..100: note = This region may encompass 0-4 nucleotides

SEQ ID NO: 2393 - RNA, 100 nt, synthetic construct; identical to SEQ ID NO: 1393
  source 1..100: mol_type = other RNA
  modified_base 1: mod_base = OTHER; note = 2'-O-methyl modified nucleotide with phosphorothioate linkage
  modified_base 2: mod_base = OTHER; note = 2'-O-methyl modified nucleotide with phosphorothioate linkage
  modified_base 3: mod_base = OTHER; note = 2'-O-methyl modified nucleotide with phosphorothioate linkage
  modified_base 29: mod_base = OTHER; note = 2'-O-methyl modified nucleotide
  modified_base 30: mod_base = OTHER; note = 2'-O-methyl modified nucleotide
  modified_base 31: mod_base = OTHER; note = 2'-O-methyl modified nucleotide
  modified_base 32: mod_base = OTHER; note = 2'-O-methyl modified nucleotide
  modified_base 33: mod_base = OTHER; note = 2'-O-methyl modified nucleotide
  modified_base 34: mod_base = OTHER; note = 2'-O-methyl modified nucleotide
  modified_base 35: mod_base = OTHER; note = 2'-O-methyl modified nucleotide
  modified_base 36: mod_base = OTHER; note = 2'-O-methyl modified nucleotide
  modified_base 37: mod_base = OTHER; note = 2'-O-methyl modified nucleotide
  modified_base 38: mod_base = OTHER; note = 2'-O-methyl modified nucleotide
  modified_base 39: mod_base = OTHER; note = 2'-O-methyl modified nucleotide
  modified_base 40: mod_base = OTHER; note = 2'-O-methyl modified nucleotide
  modified_base 69: mod_base = OTHER; note = 2'-O-methyl modified nucleotide
  modified_base 70: mod_base = OTHER; note = 2'-O-methyl modified nucleotide
  modified_base 71: mod_base = OTHER; note = 2'-O-methyl modified nucleotide
  modified_base 72: mod_base = OTHER; note = 2'-O-methyl modified nucleotide
  modified_base 73: mod_base = OTHER; note = 2'-O-methyl modified nucleotide
  modified_base 74: mod_base = OTHER; note = 2'-O-methyl modified nucleotide
  modified_base 75: mod_base = OTHER; note = 2'-O-methyl modified nucleotide
  modified_base 76: mod_base = OTHER; note = 2'-O-methyl modified nucleotide
  modified_base 77: mod_base = OTHER; note = 2'-O-methyl modified nucleotide
  modified_base 78: mod_base = OTHER; note = 2'-O-methyl modified nucleotide
  modified_base 79: mod_base = OTHER; note = 2'-O-methyl modified nucleotide
  modified_base 80: mod_base = OTHER; note = 2'-O-methyl modified nucleotide
  modified_base 81: mod_base = OTHER; note = 2'-O-methyl modified nucleotide
  modified_base 82: mod_base = OTHER; note = 2'-O-methyl modified nucleotide
  modified_base 83: mod_base = OTHER; note = 2'-O-methyl modified nucleotide
  modified_base 84: mod_base = OTHER; note = 2'-O-methyl modified nucleotide
  modified_base 85: mod_base = OTHER; note = 2'-O-methyl modified nucleotide
  modified_base 86: mod_base = OTHER; note = 2'-O-methyl modified nucleotide
  modified_base 87: mod_base = OTHER; note = 2'-O-methyl modified nucleotide
  modified_base 88: mod_base = OTHER; note = 2'-O-methyl modified nucleotide
  modified_base 89: mod_base = OTHER; note = 2'-O-methyl modified nucleotide
  modified_base 90: mod_base = OTHER; note = 2'-O-methyl modified nucleotide
  modified_base 91: mod_base = OTHER; note = 2'-O-methyl modified nucleotide
  modified_base 92: mod_base = OTHER; note = 2'-O-methyl modified nucleotide
  modified_base 93: mod_base = OTHER; note = 2'-O-methyl modified nucleotide
  modified_base 94: mod_base = OTHER; note = 2'-O-methyl modified nucleotide
  modified_base 95: mod_base = OTHER; note = 2'-O-methyl modified nucleotide
  modified_base 96: mod_base = OTHER; note = 2'-O-methyl modified nucleotide
  modified_base 97: mod_base = OTHER; note = 2'-O-methyl modified nucleotide with phosphorothioate linkage
  modified_base 98: mod_base = OTHER; note = 2'-O-methyl modified nucleotide with phosphorothioate linkage
  modified_base 99: mod_base = OTHER; note = 2'-O-methyl modified nucleotide with phosphorothioate linkage
  modified_base 100: mod_base = OTHER; note = 2'-O-methyl modified nucleotide
  misc_difference 97..100: note = This region may encompass 0-4 nucleotides

SEQ ID NO: 2394 - RNA, 100 nt, synthetic construct; identical to SEQ ID NO: 1394
  source 1..100: mol_type = other RNA
  modified_base 1: mod_base = OTHER; note = 2'-O-methyl modified nucleotide with phosphorothioate linkage
  modified_base 2: mod_base = OTHER; note = 2'-O-methyl modified nucleotide with phosphorothioate linkage
  modified_base 3: mod_base = OTHER; note = 2'-O-methyl modified nucleotide with phosphorothioate linkage
  modified_base 29: mod_base = OTHER; note = 2'-O-methyl modified nucleotide
  modified_base 30: mod_base = OTHER; note = 2'-O-methyl modified nucleotide
  modified_base 31: mod_base = OTHER; note = 2'-O-methyl modified nucleotide
  modified_base 32: mod_base = OTHER; note = 2'-O-methyl modified nucleotide
  modified_base 33: mod_base = OTHER; note = 2'-O-methyl modified nucleotide
  modified_base 34: mod_base = OTHER; note = 2'-O-methyl modified nucleotide
  modified_base 35: mod_base = OTHER; note = 2'-O-methyl modified nucleotide
  modified_base 36: mod_base = OTHER; note = 2'-O-methyl modified nucleotide
  modified_base 37: mod_base = OTHER; note = 2'-O-methyl modified nucleotide
  modified_base 38: mod_base = OTHER; note = 2'-O-methyl modified nucleotide
  modified_base 39: mod_base = OTHER; note = 2'-O-methyl modified nucleotide
  modified_base 40: mod_base = OTHER; note = 2'-O-methyl modified nucleotide
  modified_base 69: mod_base = OTHER; note = 2'-O-methyl modified nucleotide
  modified_base 70: mod_base = OTHER; note = 2'-O-methyl modified nucleotide
  modified_base 71: mod_base = OTHER; note = 2'-O-methyl modified nucleotide
  modified_base 72: mod_base = OTHER; note = 2'-O-methyl modified nucleotide
  modified_base 73: mod_base = OTHER; note = 2'-O-methyl modified nucleotide
  modified_base 74: mod_base = OTHER; note = 2'-O-methyl modified nucleotide
  modified_base 75: mod_base = OTHER; note = 2'-O-methyl modified nucleotide
  modified_base 76: mod_base = OTHER; note = 2'-O-methyl modified nucleotide
  modified_base 77: mod_base = OTHER; note = 2'-O-methyl modified nucleotide
  modified_base 78: mod_base = OTHER; note = 2'-O-methyl modified nucleotide
  modified_base 79: mod_base = OTHER; note = 2'-O-methyl modified nucleotide
  modified_base 80: mod_base = OTHER; note = 2'-O-methyl modified nucleotide
  modified_base 81: mod_base = OTHER; note = 2'-O-methyl modified nucleotide
  modified_base 82: mod_base = OTHER; note = 2'-O-methyl modified nucleotide
  modified_base 83: mod_base = OTHER; note = 2'-O-methyl modified nucleotide
  modified_base 84: mod_base = OTHER; note = 2'-O-methyl modified nucleotide
  modified_base 85: mod_base = OTHER; note = 2'-O-methyl modified nucleotide
  modified_base 86: mod_base = OTHER; note = 2'-O-methyl modified nucleotide
  modified_base 87: mod_base = OTHER; note = 2'-O-methyl modified nucleotide
  modified_base 88: mod_base = OTHER; note = 2'-O-methyl modified nucleotide
  modified_base 89: mod_base = OTHER; note = 2'-O-methyl modified nucleotide
  modified_base 90: mod_base = OTHER; note = 2'-O-methyl modified nucleotide
  modified_base 91: mod_base = OTHER; note = 2'-O-methyl modified nucleotide
  modified_base 92: mod_base = OTHER; note = 2'-O-methyl modified nucleotide
  modified_base 93: mod_base = OTHER; note = 2'-O-methyl modified nucleotide
  modified_base 94: mod_base = OTHER; note = 2'-O-methyl modified nucleotide
  modified_base 95: mod_base = OTHER; note = 2'-O-methyl modified nucleotide
  modified_base 96: mod_base = OTHER; note = 2'-O-methyl modified nucleotide
  modified_base 97: mod_base = OTHER; note = 2'-O-methyl modified nucleotide with phosphorothioate linkage
  modified_base 98: mod_base = OTHER; note = 2'-O-methyl modified nucleotide with phosphorothioate linkage
  modified_base 99: mod_base = OTHER; note = 2'-O-methyl modified nucleotide with phosphorothioate linkage
  modified_base 100: mod_base = OTHER; note = 2'-O-methyl modified nucleotide
  misc_difference 97..100: note = This region may encompass 0-4 nucleotides

SEQ ID NO: 2395 - RNA, 100 nt, synthetic construct; identical to SEQ ID NO: 1395
  source 1..100: mol_type = other RNA
  modified_base 1: mod_base = OTHER; note = 2'-O-methyl modified nucleotide with phosphorothioate linkage
  modified_base 2: mod_base = OTHER; note = 2'-O-methyl modified nucleotide with phosphorothioate linkage
  modified_base 3: mod_base = OTHER; note = 2'-O-methyl modified nucleotide with phosphorothioate linkage
  modified_base 29: mod_base = OTHER; note = 2'-O-methyl modified nucleotide
  modified_base 30: mod_base = OTHER; note = 2'-O-methyl modified nucleotide
  modified_base 31: mod_base = OTHER; note = 2'-O-methyl modified nucleotide
  modified_base 32: mod_base = OTHER; note = 2'-O-methyl modified nucleotide
  modified_base 33: mod_base = OTHER; note = 2'-O-methyl modified nucleotide
  modified_base 34: mod_base = OTHER; note = 2'-O-methyl modified nucleotide
  modified_base 35: mod_base = OTHER; note = 2'-O-methyl modified nucleotide
  modified_base 36: mod_base = OTHER; note = 2'-O-methyl modified nucleotide
  modified_base 37: mod_base = OTHER; note = 2'-O-methyl modified nucleotide
  modified_base 38: mod_base = OTHER; note = 2'-O-methyl modified nucleotide
  modified_base 39: mod_base = OTHER; note = 2'-O-methyl modified nucleotide
  modified_base 40: mod_base = OTHER; note = 2'-O-methyl modified nucleotide
  modified_base 69: mod_base = OTHER; note = 2'-O-methyl modified nucleotide
  modified_base 70: mod_base = OTHER; note = 2'-O-methyl modified nucleotide
  modified_base 71: mod_base = OTHER; note = 2'-O-methyl modified nucleotide
  modified_base 72: mod_base = OTHER; note = 2'-O-methyl modified nucleotide
  modified_base 73: mod_base = OTHER; note = 2'-O-methyl modified nucleotide
  modified_base 74: mod_base = OTHER; note = 2'-O-methyl modified nucleotide
  modified_base 75: mod_base = OTHER; note = 2'-O-methyl modified nucleotide
  modified_base 76: mod_base = OTHER; note = 2'-O-methyl modified nucleotide
  modified_base 77: mod_base = OTHER; note = 2'-O-methyl modified nucleotide
  modified_base 78: mod_base = OTHER; note = 2'-O-methyl modified nucleotide
  modified_base 79: mod_base = OTHER; note = 2'-O-methyl modified nucleotide
  modified_base 80: mod_base = OTHER; note = 2'-O-methyl modified nucleotide
  modified_base 81: mod_base = OTHER; note = 2'-O-methyl modified nucleotide
  modified_base 82: mod_base = OTHER; note = 2'-O-methyl modified nucleotide
  modified_base 83: mod_base = OTHER; note = 2'-O-methyl modified nucleotide
  modified_base 84: mod_base = OTHER; note = 2'-O-methyl modified nucleotide
  modified_base 85: mod_base = OTHER; note = 2'-O-methyl modified nucleotide
  modified_base 86: mod_base = OTHER; note = 2'-O-methyl modified nucleotide
  modified_base 87: mod_base = OTHER; note = 2'-O-methyl modified nucleotide
  modified_base 88: mod_base = OTHER; note = 2'-O-methyl modified nucleotide
  modified_base 89: mod_base = OTHER; note = 2'-O-methyl modified nucleotide
  modified_base 90: mod_base = OTHER; note = 2'-O-methyl modified nucleotide
  modified_base 91: mod_base = OTHER; note = 2'-O-methyl modified nucleotide
  modified_base 92: mod_base = OTHER; note = 2'-O-methyl modified nucleotide
  modified_base 93: mod_base = OTHER; note = 2'-O-methyl modified nucleotide
  modified_base 94: mod_base = OTHER; note = 2'-O-methyl modified nucleotide
  modified_base 95: mod_base = OTHER; note = 2'-O-methyl modified nucleotide
  modified_base 96: mod_base = OTHER; note = 2'-O-methyl modified nucleotide
  modified_base 97: mod_base = OTHER; note = 2'-O-methyl modified nucleotide with phosphorothioate linkage
  modified_base 98: mod_base = OTHER; note = 2'-O-methyl modified nucleotide with phosphorothioate linkage
  modified_base 99: mod_base = OTHER; note = 2'-O-methyl modified nucleotide with phosphorothioate linkage
  modified_base 100: mod_base = OTHER; note = 2'-O-methyl modified nucleotide
  misc_difference 97..100: note = This region may encompass 0-4 nucleotides

SEQ ID NO: 2396 - RNA, 100 nt, synthetic construct; identical to SEQ ID NO: 1396
  source 1..100: mol_type = other RNA
  modified_base 1: mod_base = OTHER; note = 2'-O-methyl modified nucleotide with phosphorothioate linkage
  modified_base 2: mod_base = OTHER; note = 2'-O-methyl modified nucleotide with phosphorothioate linkage
  modified_base 3: mod_base = OTHER; note = 2'-O-methyl modified nucleotide with phosphorothioate linkage
  modified_base 29: mod_base = OTHER; note = 2'-O-methyl modified nucleotide
  modified_base 30: mod_base = OTHER; note = 2'-O-methyl modified nucleotide
  modified_base 31: mod_base = OTHER; note = 2'-O-methyl modified nucleotide
  modified_base 32: mod_base = OTHER; note = 2'-O-methyl modified nucleotide
  modified_base 33: mod_base = OTHER; note = 2'-O-methyl modified nucleotide
  modified_base 34: mod_base = OTHER; note = 2'-O-methyl modified nucleotide
  modified_base 35: mod_base = OTHER; note = 2'-O-methyl modified nucleotide
  modified_base 36: mod_base = OTHER; note = 2'-O-methyl modified nucleotide
  modified_base 37: mod_base = OTHER; note = 2'-O-methyl modified nucleotide
  modified_base 38: mod_base = OTHER; note = 2'-O-methyl modified nucleotide
  modified_base 39: mod_base = OTHER; note = 2'-O-methyl modified nucleotide
  modified_base 40: mod_base = OTHER; note = 2'-O-methyl modified nucleotide
  modified_base 69: mod_base = OTHER; note = 2'-O-methyl modified nucleotide
  modified_base 70: mod_base = OTHER; note = 2'-O-methyl modified nucleotide
  modified_base 71: mod_base = OTHER; note = 2'-O-methyl modified nucleotide
  modified_base 72: mod_base = OTHER; note = 2'-O-methyl modified nucleotide
  modified_base 73: mod_base = OTHER; note = 2'-O-methyl modified nucleotide
  modified_base 74: mod_base = OTHER; note = 2'-O-methyl modified nucleotide
  modified_base 75: mod_base = OTHER; note = 2'-O-methyl modified nucleotide
  modified_base 76: mod_base = OTHER; note = 2'-O-methyl modified nucleotide
  modified_base 77: mod_base = OTHER; note = 2'-O-methyl modified nucleotide
  modified_base 78: mod_base = OTHER; note = 2'-O-methyl modified nucleotide
  modified_base 79: mod_base = OTHER; note = 2'-O-methyl modified nucleotide
  modified_base 80: mod_base = OTHER; note = 2'-O-methyl modified nucleotide
  modified_base 81: mod_base = OTHER; note = 2'-O-methyl modified nucleotide
  modified_base 82: mod_base = OTHER; note = 2'-O-methyl modified nucleotide
  modified_base 83: mod_base = OTHER; note = 2'-O-methyl modified nucleotide
  modified_base 84: mod_base = OTHER; note = 2'-O-methyl modified nucleotide
  modified_base 85: mod_base = OTHER; note = 2'-O-methyl modified nucleotide
  modified_base 86: mod_base = OTHER; note = 2'-O-methyl modified nucleotide
  modified_base 87: mod_base = OTHER; note = 2'-O-methyl modified nucleotide
  modified_base 88: mod_base = OTHER; note = 2'-O-methyl modified nucleotide
  modified_base 89: mod_base = OTHER; note = 2'-O-methyl modified nucleotide
  modified_base 90: mod_base = OTHER; note = 2'-O-methyl modified nucleotide
  modified_base 91: mod_base = OTHER; note = 2'-O-methyl modified nucleotide
  modified_base 92: mod_base = OTHER; note = 2'-O-methyl modified nucleotide
  modified_base 93: mod_base = OTHER; note = 2'-O-methyl modified nucleotide
  modified_base 94: mod_base = OTHER; note = 2'-O-methyl modified nucleotide
  modified_base 95: mod_base = OTHER; note = 2'-O-methyl modified nucleotide
  modified_base 96: mod_base = OTHER; note = 2'-O-methyl modified nucleotide
  modified_base 97: mod_base = OTHER; note = 2'-O-methyl modified nucleotide with phosphorothioate linkage
  modified_base 98: mod_base = OTHER; note = 2'-O-methyl modified nucleotide with phosphorothioate linkage
  modified_base 99: mod_base = OTHER; note = 2'-O-methyl modified nucleotide with phosphorothioate linkage
  modified_base 100: mod_base = OTHER; note = 2'-O-methyl modified nucleotide
  misc_difference 97..100: note = This region may encompass 0-4 nucleotides

SEQ ID NO: 2397 - RNA, 100 nt, synthetic construct; identical to SEQ ID NO: 1397
  source 1..100: mol_type = other RNA
  modified_base 1: mod_base = OTHER; note = 2'-O-methyl modified nucleotide with phosphorothioate linkage
  modified_base 2: mod_base = OTHER; note = 2'-O-methyl modified nucleotide with phosphorothioate linkage
  modified_base 3: mod_base = OTHER; note = 2'-O-methyl modified nucleotide with phosphorothioate linkage
  modified_base 29: mod_base = OTHER; note = 2'-O-methyl modified nucleotide
  modified_base 30: mod_base = OTHER; note = 2'-O-methyl modified nucleotide
  modified_base 31: mod_base = OTHER; note = 2'-O-methyl modified nucleotide
  modified_base 32: mod_base = OTHER; note = 2'-O-methyl modified nucleotide
  modified_base 33: mod_base = OTHER; note = 2'-O-methyl modified nucleotide
  modified_base 34: mod_base = OTHER; note = 2'-O-methyl modified nucleotide
  modified_base 35: mod_base = OTHER; note = 2'-O-methyl modified nucleotide
  modified_base 36: mod_base = OTHER; note = 2'-O-methyl modified nucleotide
  modified_base 37: mod_base = OTHER; note = 2'-O-methyl modified nucleotide
  modified_base 38: mod_base = OTHER; note = 2'-O-methyl modified nucleotide
  modified_base 39: mod_base = OTHER; note = 2'-O-methyl modified nucleotide
  modified_base 40: mod_base = OTHER; note = 2'-O-methyl modified nucleotide
  modified_base 69: mod_base = OTHER; note = 2'-O-methyl modified nucleotide
  modified_base 70: mod_base = OTHER; note = 2'-O-methyl modified nucleotide
  modified_base 71: mod_base = OTHER; note = 2'-O-methyl modified nucleotide
  modified_base 72: mod_base = OTHER; note = 2'-O-methyl modified nucleotide
  modified_base 73: mod_base = OTHER; note = 2'-O-methyl modified nucleotide
  modified_base 74: mod_base = OTHER; note = 2'-O-methyl modified nucleotide
  modified_base 75: mod_base = OTHER; note = 2'-O-methyl modified nucleotide
  modified_base 76: mod_base = OTHER; note = 2'-O-methyl modified nucleotide
  modified_base 77: mod_base = OTHER; note = 2'-O-methyl modified nucleotide
  modified_base 78: mod_base = OTHER; note = 2'-O-methyl modified nucleotide
  modified_base 79: mod_base = OTHER; note = 2'-O-methyl modified nucleotide
  modified_base 80: mod_base = OTHER; note = 2'-O-methyl modified nucleotide
  modified_base 81: mod_base = OTHER; note = 2'-O-methyl modified nucleotide
  modified_base 82: mod_base = OTHER; note = 2'-O-methyl modified nucleotide
  modified_base 83: mod_base = OTHER; note = 2'-O-methyl modified nucleotide
  modified_base 84: mod_base = OTHER; note = 2'-O-methyl modified nucleotide
  modified_base 85: mod_base = OTHER; note = 2'-O-methyl modified nucleotide
  modified_base 86: mod_base = OTHER; note = 2'-O-methyl modified nucleotide
  modified_base 87: mod_base = OTHER; note = 2'-O-methyl modified nucleotide
  modified_base 88: mod_base = OTHER; note = 2'-O-methyl modified nucleotide
  modified_base 89: mod_base = OTHER; note = 2'-O-methyl modified nucleotide
  modified_base 90: mod_base = OTHER; note = 2'-O-methyl modified nucleotide
  modified_base 91: mod_base = OTHER; note = 2'-O-methyl modified nucleotide
  modified_base 92: mod_base = OTHER; note = 2'-O-methyl modified nucleotide
  modified_base 93: mod_base = OTHER; note = 2'-O-methyl modified nucleotide
  modified_base 94: mod_base = OTHER; note = 2'-O-methyl modified nucleotide
  modified_base 95: mod_base = OTHER; note = 2'-O-methyl modified nucleotide
  modified_base 96: mod_base = OTHER; note = 2'-O-methyl modified nucleotide
  modified_base 97: mod_base = OTHER; note = 2'-O-methyl modified nucleotide with phosphorothioate linkage
  modified_base 98: mod_base = OTHER; note = 2'-O-methyl modified nucleotide with phosphorothioate linkage
  modified_base 99: mod_base = OTHER; note = 2'-O-methyl modified nucleotide with phosphorothioate linkage
  modified_base 100: mod_base = OTHER; note = 2'-O-methyl modified nucleotide
  misc_difference 97..100: note = This region may encompass 0-4 nucleotides

SEQ ID NO: 2398 - RNA, 100 nt, synthetic construct; identical to SEQ ID NO: 1398
  source 1..100: mol_type = other RNA
  modified_base 1: mod_base = OTHER; note = 2'-O-methyl modified nucleotide with phosphorothioate linkage
  modified_base 2: mod_base = OTHER; note = 2'-O-methyl modified nucleotide with phosphorothioate linkage
  modified_base 3: mod_base = OTHER; note = 2'-O-methyl modified nucleotide with phosphorothioate linkage
  modified_base 29: mod_base = OTHER; note = 2'-O-methyl modified nucleotide
  modified_base 30: mod_base = OTHER; note = 2'-O-methyl modified nucleotide
  modified_base 31: mod_base = OTHER; note = 2'-O-methyl modified nucleotide
  modified_base 32: mod_base = OTHER; note = 2'-O-methyl modified nucleotide
  modified_base 33: mod_base = OTHER; note = 2'-O-methyl modified nucleotide
  modified_base 34: mod_base = OTHER; note = 2'-O-methyl modified nucleotide
  modified_base 35: mod_base = OTHER; note = 2'-O-methyl modified nucleotide
  modified_base 36: mod_base = OTHER; note = 2'-O-methyl modified nucleotide
  modified_base 37: mod_base = OTHER; note = 2'-O-methyl modified nucleotide
  modified_base 38: mod_base = OTHER; note = 2'-O-methyl modified nucleotide
  modified_base 39: mod_base = OTHER; note = 2'-O-methyl modified nucleotide
  modified_base 40: mod_base = OTHER; note = 2'-O-methyl modified nucleotide
  modified_base 69: mod_base = OTHER; note = 2'-O-methyl modified nucleotide
  modified_base 70: mod_base = OTHER; note = 2'-O-methyl modified nucleotide
  modified_base 71: mod_base = OTHER; note = 2'-O-methyl modified nucleotide
  modified_base 72: mod_base = OTHER; note = 2'-O-methyl modified nucleotide
  modified_base 73: mod_base = OTHER; note = 2'-O-methyl modified nucleotide
  modified_base 74: mod_base = OTHER; note = 2'-O-methyl modified nucleotide
  modified_base 75: mod_base = OTHER; note = 2'-O-methyl modified nucleotide
  modified_base 76: mod_base = OTHER; note = 2'-O-methyl modified nucleotide
  modified_base 77: mod_base = OTHER; note = 2'-O-methyl modified nucleotide
  modified_base 78: mod_base = OTHER; note = 2'-O-methyl modified nucleotide
  modified_base 79: mod_base = OTHER; note = 2'-O-methyl modified nucleotide
  modified_base 80: mod_base = OTHER; note = 2'-O-methyl modified nucleotide
  modified_base 81: mod_base = OTHER; note = 2'-O-methyl modified nucleotide
  modified_base 82: mod_base = OTHER; note = 2'-O-methyl modified nucleotide
  modified_base 83: mod_base = OTHER; note = 2'-O-methyl modified nucleotide
  modified_base 84: mod_base = OTHER; note = 2'-O-methyl modified nucleotide
  modified_base 85: mod_base = OTHER; note = 2'-O-methyl modified nucleotide
  modified_base 86: mod_base = OTHER; note = 2'-O-methyl modified nucleotide
  modified_base 87: mod_base = OTHER; note = 2'-O-methyl modified nucleotide
  modified_base 88: mod_base = OTHER; note = 2'-O-methyl modified nucleotide
  modified_base 89: mod_base = OTHER; note = 2'-O-methyl modified nucleotide
  modified_base 90: mod_base = OTHER; note = 2'-O-methyl modified nucleotide
  modified_base 91: mod_base = OTHER; note = 2'-O-methyl modified nucleotide
  modified_base 92: mod_base = OTHER; note = 2'-O-methyl modified nucleotide
  modified_base 93: mod_base = OTHER; note = 2'-O-methyl modified nucleotide
  modified_base 94: mod_base = OTHER; note = 2'-O-methyl modified nucleotide
  modified_base 95: mod_base = OTHER; note = 2'-O-methyl modified nucleotide
  modified_base 96: mod_base = OTHER; note = 2'-O-methyl modified nucleotide
  modified_base 97: mod_base = OTHER; note = 2'-O-methyl modified nucleotide with phosphorothioate linkage
  modified_base 98: mod_base = OTHER; note = 2'-O-methyl modified nucleotide with phosphorothioate linkage
  modified_base 99: mod_base = OTHER; note = 2'-O-methyl modified nucleotide with phosphorothioate linkage
  modified_base 100: mod_base = OTHER; note = 2'-O-methyl modified nucleotide
  misc_difference 97..100: note = This region may encompass 0-4 nucleotides

SEQ ID NO: 2399 - RNA, 100 nt, synthetic construct; identical to SEQ ID NO: 1399
  source 1..100: mol_type = other RNA
  modified_base 1: mod_base = OTHER; note = 2'-O-methyl modified nucleotide with phosphorothioate linkage
  modified_base 2: mod_base = OTHER; note = 2'-O-methyl modified nucleotide with phosphorothioate linkage
  modified_base 3: mod_base = OTHER; note = 2'-O-methyl modified nucleotide with phosphorothioate linkage
  modified_base 29: mod_base = OTHER; note = 2'-O-methyl modified nucleotide
  modified_base 30: mod_base = OTHER; note = 2'-O-methyl modified nucleotide
  modified_base 31: mod_base = OTHER; note = 2'-O-methyl modified nucleotide
  modified_base 32: mod_base = OTHER; note = 2'-O-methyl modified nucleotide
  modified_base 33: mod_base = OTHER; note = 2'-O-methyl modified nucleotide
  modified_base 34: mod_base = OTHER; note = 2'-O-methyl modified nucleotide
  modified_base 35: mod_base = OTHER; note = 2'-O-methyl modified nucleotide
  modified_base 36: mod_base = OTHER; note = 2'-O-methyl modified nucleotide
  modified_base 37: mod_base = OTHER; note = 2'-O-methyl modified nucleotide
  modified_base 38: mod_base = OTHER; note = 2'-O-methyl modified nucleotide
  modified_base 39: mod_base = OTHER; note = 2'-O-methyl modified nucleotide
  modified_base 40: mod_base = OTHER; note = 2'-O-methyl modified nucleotide
  modified_base 69: mod_base = OTHER; note = 2'-O-methyl modified nucleotide
  modified_base 70: mod_base = OTHER; note = 2'-O-methyl modified nucleotide
  modified_base 71: mod_base = OTHER; note = 2'-O-methyl modified nucleotide
  modified_base 72: mod_base = OTHER; note = 2'-O-methyl modified nucleotide
  modified_base 73: mod_base = OTHER; note = 2'-O-methyl modified nucleotide
  modified_base 74: mod_base = OTHER; note = 2'-O-methyl modified nucleotide
  modified_base 75: mod_base = OTHER; note = 2'-O-methyl modified nucleotide
  modified_base 76: mod_base = OTHER; note = 2'-O-methyl modified nucleotide
  modified_base 77: mod_base = OTHER; note = 2'-O-methyl modified nucleotide
  modified_base 78: mod_base = OTHER; note = 2'-O-methyl modified nucleotide
  modified_base 79: mod_base = OTHER; note = 2'-O-methyl modified nucleotide
  modified_base 80: mod_base = OTHER; note = 2'-O-methyl modified nucleotide
  modified_base 81: mod_base = OTHER; note = 2'-O-methyl modified nucleotide
  modified_base 82: mod_base = OTHER; note = 2'-O-methyl modified nucleotide
  modified_base 83: mod_base = OTHER; note = 2'-O-methyl modified nucleotide
  modified_base 84: mod_base = OTHER; note = 2'-O-methyl modified nucleotide
  modified_base 85: mod_base = OTHER; note = 2'-O-methyl modified nucleotide
  modified_base 86: mod_base = OTHER; note = 2'-O-methyl modified nucleotide
  modified_base 87: mod_base = OTHER; note = 2'-O-methyl modified nucleotide
  modified_base 88: mod_base = OTHER; note = 2'-O-methyl modified nucleotide
  modified_base 89: mod_base = OTHER; note = 2'-O-methyl modified nucleotide
  modified_base 90: mod_base = OTHER; note = 2'-O-methyl modified nucleotide
  modified_base 91: mod_base = OTHER; note = 2'-O-methyl modified nucleotide
  modified_base 92: mod_base = OTHER; note = 2'-O-methyl modified nucleotide
  modified_base 93: mod_base = OTHER; note = 2'-O-methyl modified nucleotide
  modified_base 94: mod_base = OTHER; note = 2'-O-methyl modified nucleotide
  modified_base 95: mod_base = OTHER; note = 2'-O-methyl modified nucleotide
  modified_base 96: mod_base = OTHER; note = 2'-O-methyl modified nucleotide
  modified_base 97: mod_base = OTHER; note = 2'-O-methyl modified nucleotide with phosphorothioate linkage
  modified_base 98: mod_base = OTHER; note = 2'-O-methyl modified nucleotide with phosphorothioate linkage
  modified_base 99: mod_base = OTHER; note = 2'-O-methyl modified nucleotide with phosphorothioate linkage
  modified_base 100: mod_base = OTHER; note = 2'-O-methyl modified nucleotide
  misc_difference 97..100: note = This region may encompass 0-4 nucleotides

SEQ ID NO: 2400 - RNA, 100 nt, synthetic construct; identical to SEQ ID NO: 1400
  source 1..100: mol_type = other RNA
  modified_base 1: mod_base = OTHER; note = 2'-O-methyl modified nucleotide with phosphorothioate linkage
  modified_base 2: mod_base = OTHER; note = 2'-O-methyl modified nucleotide with phosphorothioate linkage
  modified_base 3: mod_base = OTHER; note = 2'-O-methyl modified nucleotide with phosphorothioate linkage
  modified_base 29: mod_base = OTHER; note = 2'-O-methyl modified nucleotide
  modified_base 30: mod_base = OTHER; note = 2'-O-methyl modified nucleotide
  modified_base 31: mod_base = OTHER; note = 2'-O-methyl modified nucleotide
  modified_base 32: mod_base = OTHER; note = 2'-O-methyl modified nucleotide
  modified_base 33: mod_base = OTHER; note = 2'-O-methyl modified nucleotide
  modified_base 34: mod_base = OTHER; note = 2'-O-methyl modified nucleotide
  modified_base 35: mod_base = OTHER; note = 2'-O-methyl modified nucleotide
  modified_base 36: mod_base = OTHER; note = 2'-O-methyl modified nucleotide
  modified_base 37: mod_base = OTHER; note = 2'-O-methyl modified nucleotide
  modified_base 38: mod_base = OTHER; note = 2'-O-methyl modified nucleotide
  modified_base 39: mod_base = OTHER; note = 2'-O-methyl modified nucleotide
  modified_base 40: mod_base = OTHER; note = 2'-O-methyl modified nucleotide
  modified_base 69: mod_base = OTHER; note = 2'-O-methyl modified nucleotide
  modified_base 70: mod_base = OTHER; note = 2'-O-methyl modified nucleotide
  modified_base 71: mod_base = OTHER; note = 2'-O-methyl modified nucleotide
  modified_base 72: mod_base = OTHER; note = 2'-O-methyl modified nucleotide
  modified_base 73: mod_base = OTHER; note = 2'-O-methyl modified nucleotide
  modified_base 74: mod_base = OTHER; note = 2'-O-methyl modified nucleotide
  modified_base 75: mod_base = OTHER; note = 2'-O-methyl modified nucleotide
  modified_base 76: mod_base = OTHER; note = 2'-O-methyl modified nucleotide
  modified_base 77: mod_base = OTHER; note = 2'-O-methyl modified nucleotide
  modified_base 78: mod_base = OTHER; note = 2'-O-methyl modified nucleotide
  modified_base 79: mod_base = OTHER; note = 2'-O-methyl modified nucleotide
  modified_base 80: mod_base = OTHER; note = 2'-O-methyl modified nucleotide
  modified_base 81: mod_base = OTHER; note = 2'-O-methyl modified nucleotide
  modified_base 82: mod_base = OTHER; note = 2'-O-methyl modified nucleotide
  modified_base 83: mod_base = OTHER; note = 2'-O-methyl modified nucleotide
  modified_base 84: mod_base = OTHER; note = 2'-O-methyl modified nucleotide
  modified_base 85: mod_base = OTHER; note = 2'-O-methyl modified nucleotide
  modified_base 86: mod_base = OTHER; note = 2'-O-methyl modified nucleotide
  modified_base 87: mod_base = OTHER; note = 2'-O-methyl modified nucleotide
  modified_base 88: mod_base = OTHER; note = 2'-O-methyl modified nucleotide
  modified_base 89: mod_base = OTHER; note = 2'-O-methyl modified nucleotide
  modified_base 90: mod_base = OTHER; note = 2'-O-methyl modified nucleotide
  modified_base 91: mod_base = OTHER; note = 2'-O-methyl modified nucleotide
  modified_base 92: mod_base = OTHER; note = 2'-O-methyl modified nucleotide
  modified_base 93: mod_base = OTHER; note = 2'-O-methyl modified nucleotide
  modified_base 94: mod_base = OTHER; note = 2'-O-methyl modified nucleotide
  modified_base 95: mod_base = OTHER; note = 2'-O-methyl modified nucleotide
  modified_base 96: mod_base = OTHER; note = 2'-O-methyl modified nucleotide
  modified_base 97: mod_base = OTHER; note = 2'-O-methyl modified nucleotide with phosphorothioate linkage
  modified_base 98: mod_base = OTHER; note = 2'-O-methyl modified nucleotide with phosphorothioate linkage
  modified_base 99: mod_base = OTHER; note = 2'-O-methyl modified nucleotide with phosphorothioate linkage
  modified_base 100: mod_base = OTHER; note = 2'-O-methyl modified nucleotide
  misc_difference 97..100: note = This region may encompass 0-4 nucleotides

SEQ ID NO: 2401 - RNA, 100 nt, synthetic construct; identical to SEQ ID NO: 1401
  source 1..100: mol_type = other RNA
  modified_base 1: mod_base = OTHER; note = 2'-O-methyl modified nucleotide with phosphorothioate linkage
  modified_base 2: mod_base = OTHER; note = 2'-O-methyl modified nucleotide with phosphorothioate linkage
  modified_base 3: mod_base = OTHER; note = 2'-O-methyl modified nucleotide with phosphorothioate linkage
  modified_base 29: mod_base = OTHER; note = 2'-O-methyl modified nucleotide
  modified_base 30: mod_base = OTHER; note = 2'-O-methyl modified nucleotide
  modified_base 31: mod_base = OTHER; note = 2'-O-methyl modified nucleotide
  modified_base 32: mod_base = OTHER; note = 2'-O-methyl modified nucleotide
  modified_base 33: mod_base = OTHER; note = 2'-O-methyl modified nucleotide
  modified_base 34: mod_base = OTHER; note = 2'-O-methyl modified nucleotide
  modified_base 35: mod_base = OTHER; note = 2'-O-methyl modified nucleotide
  modified_base 36: mod_base = OTHER; note = 2'-O-methyl modified nucleotide
  modified_base 37: mod_base = OTHER; note = 2'-O-methyl modified nucleotide
  modified_base 38: mod_base = OTHER; note = 2'-O-methyl modified nucleotide
  modified_base 39: mod_base = OTHER; note = 2'-O-methyl modified nucleotide
  modified_base 40: mod_base = OTHER; note = 2'-O-methyl modified nucleotide
  modified_base 69: mod_base = OTHER; note = 2'-O-methyl modified nucleotide
  modified_base 70: mod_base = OTHER; note = 2'-O-methyl modified nucleotide
  modified_base 71: mod_base = OTHER; note = 2'-O-methyl modified nucleotide
  modified_base 72: mod_base = OTHER; note = 2'-O-methyl modified nucleotide
  modified_base 73: mod_base = OTHER; note = 2'-O-methyl modified nucleotide
  modified_base 74: mod_base = OTHER; note = 2'-O-methyl modified nucleotide
  modified_base 75: mod_base = OTHER; note = 2'-O-methyl modified nucleotide
  modified_base 76: mod_base = OTHER; note = 2'-O-methyl modified nucleotide
  modified_base 77: mod_base = OTHER; note = 2'-O-methyl modified nucleotide
  modified_base 78: mod_base = OTHER; note = 2'-O-methyl modified nucleotide
  modified_base 79: mod_base = OTHER; note = 2'-O-methyl modified nucleotide
  modified_base 80: mod_base = OTHER; note = 2'-O-methyl modified nucleotide
  modified_base 81: mod_base = OTHER; note = 2'-O-methyl modified nucleotide
  modified_base 82: mod_base = OTHER; note = 2'-O-methyl modified nucleotide
  modified_base 83: mod_base = OTHER; note = 2'-O-methyl modified nucleotide
  modified_base 84: mod_base = OTHER; note = 2'-O-methyl modified nucleotide
  modified_base 85: mod_base = OTHER; note = 2'-O-methyl modified nucleotide
  modified_base 86: mod_base = OTHER; note = 2'-O-methyl modified nucleotide
  modified_base 87: mod_base = OTHER; note = 2'-O-methyl modified nucleotide
  modified_base 88: mod_base = OTHER; note = 2'-O-methyl modified nucleotide
  modified_base 89: mod_base = OTHER; note = 2'-O-methyl modified nucleotide
  modified_base 90: mod_base = OTHER; note = 2'-O-methyl modified nucleotide
  modified_base 91: mod_base = OTHER; note = 2'-O-methyl modified nucleotide
  modified_base 92: mod_base = OTHER; note = 2'-O-methyl modified nucleotide
  modified_base 93: mod_base = OTHER; note = 2'-O-methyl modified nucleotide
  modified_base 94: mod_base = OTHER; note = 2'-O-methyl modified nucleotide
  modified_base 95: mod_base = OTHER; note = 2'-O-methyl modified nucleotide
  modified_base 96: mod_base = OTHER; note = 2'-O-methyl modified nucleotide
  modified_base 97: mod_base = OTHER; note = 2'-O-methyl modified nucleotide with phosphorothioate linkage
  modified_base 98: mod_base = OTHER; note = 2'-O-methyl modified nucleotide with phosphorothioate linkage
  modified_base 99: mod_base = OTHER; note = 2'-O-methyl modified nucleotide with phosphorothioate linkage
  modified_base 100: mod_base = OTHER; note = 2'-O-methyl modified nucleotide
  misc_difference 97..100: note = This region may encompass 0-4 nucleotides

SEQ ID NO: 2402 - RNA, 100 nt, synthetic construct; identical to SEQ ID NO: 1402
  source 1..100: mol_type = other RNA
  modified_base 1: mod_base = OTHER; note = 2'-O-methyl modified nucleotide with phosphorothioate linkage
  modified_base 2: mod_base = OTHER; note = 2'-O-methyl modified nucleotide with phosphorothioate linkage
  modified_base 3: mod_base = OTHER; note = 2'-O-methyl modified nucleotide with phosphorothioate linkage
  modified_base 29: mod_base = OTHER; note = 2'-O-methyl modified nucleotide
  modified_base 30: mod_base = OTHER; note = 2'-O-methyl modified nucleotide
  modified_base 31: mod_base = OTHER; note = 2'-O-methyl modified nucleotide
  modified_base 32: mod_base = OTHER; note = 2'-O-methyl modified nucleotide
  modified_base 33: mod_base = OTHER; note = 2'-O-methyl modified nucleotide
  modified_base 34: mod_base = OTHER; note = 2'-O-methyl modified nucleotide
  modified_base 35: mod_base = OTHER; note = 2'-O-methyl modified nucleotide
  modified_base 36: mod_base = OTHER; note = 2'-O-methyl modified nucleotide
  modified_base 37: mod_base = OTHER; note = 2'-O-methyl modified nucleotide
  modified_base 38: mod_base = OTHER; note = 2'-O-methyl modified nucleotide
  modified_base 39: mod_base = OTHER; note = 2'-O-methyl modified nucleotide
  modified_base 40: mod_base = OTHER; note = 2'-O-methyl modified nucleotide
  modified_base 69: mod_base = OTHER; note = 2'-O-methyl modified nucleotide
  modified_base 70: mod_base = OTHER; note = 2'-O-methyl modified nucleotide
  modified_base 71: mod_base = OTHER; note = 2'-O-methyl modified nucleotide
  modified_base 72: mod_base = OTHER; note = 2'-O-methyl modified nucleotide
  modified_base 73: mod_base = OTHER; note = 2'-O-methyl modified nucleotide
  modified_base 74: mod_base = OTHER; note = 2'-O-methyl modified nucleotide
  modified_base 75: mod_base = OTHER; note = 2'-O-methyl modified nucleotide
  modified_base 76: mod_base = OTHER; note = 2'-O-methyl modified nucleotide
  modified_base 77: mod_base = OTHER; note = 2'-O-methyl modified nucleotide
  modified_base 78: mod_base = OTHER; note = 2'-O-methyl modified nucleotide
  modified_base 79: mod_base = OTHER; note = 2'-O-methyl modified nucleotide
  modified_base 80: mod_base = OTHER; note = 2'-O-methyl modified nucleotide
  modified_base 81: mod_base = OTHER; note = 2'-O-methyl modified nucleotide
  modified_base 82: mod_base = OTHER; note = 2'-O-methyl modified nucleotide
  modified_base 83: mod_base = OTHER; note = 2'-O-methyl modified nucleotide
  modified_base 84: mod_base = OTHER; note = 2'-O-methyl modified nucleotide
  modified_base 85: mod_base = OTHER; note = 2'-O-methyl modified nucleotide
  modified_base 86: mod_base = OTHER; note = 2'-O-methyl modified nucleotide
  modified_base 87: mod_base = OTHER; note = 2'-O-methyl modified nucleotide
  modified_base 88: mod_base = OTHER; note = 2'-O-methyl modified nucleotide
  modified_base 89: mod_base = OTHER; note = 2'-O-methyl modified nucleotide
  modified_base 90: mod_base = OTHER; note = 2'-O-methyl modified nucleotide
  modified_base 91: mod_base = OTHER; note = 2'-O-methyl modified nucleotide
  modified_base 92: mod_base = OTHER; note = 2'-O-methyl modified nucleotide
  modified_base 93: mod_base = OTHER; note = 2'-O-methyl modified nucleotide
  modified_base 94: mod_base = OTHER; note = 2'-O-methyl modified nucleotide
  modified_base 95: mod_base = OTHER; note = 2'-O-methyl modified nucleotide
  modified_base 96: mod_base = OTHER; note = 2'-O-methyl modified nucleotide
  modified_base 97: mod_base = OTHER; note = 2'-O-methyl modified nucleotide with phosphorothioate linkage
  modified_base 98: mod_base = OTHER; note = 2'-O-methyl modified nucleotide with phosphorothioate linkage
  modified_base 99: mod_base = OTHER; note = 2'-O-methyl modified nucleotide with phosphorothioate linkage
  modified_base 100: mod_base = OTHER; note = 2'-O-methyl modified nucleotide
  misc_difference 97..100: note = This region may encompass 0-4 nucleotides

SEQ ID NO: 2403 - RNA, 100 nt, synthetic construct; identical to SEQ ID NO: 1403
  source 1..100: mol_type = other RNA
  modified_base 1: mod_base = OTHER; note = 2'-O-methyl modified nucleotide with phosphorothioate linkage
  modified_base 2: mod_base = OTHER; note = 2'-O-methyl modified nucleotide with phosphorothioate linkage
  modified_base 3: mod_base = OTHER; note = 2'-O-methyl modified nucleotide with phosphorothioate linkage
  modified_base 29: mod_base = OTHER; note = 2'-O-methyl modified nucleotide
  modified_base 30: mod_base = OTHER; note = 2'-O-methyl modified nucleotide
  modified_base 31: mod_base = OTHER; note = 2'-O-methyl modified nucleotide
  modified_base 32: mod_base = OTHER; note = 2'-O-methyl modified nucleotide
  modified_base 33: mod_base = OTHER; note = 2'-O-methyl modified nucleotide
  modified_base 34: mod_base = OTHER; note = 2'-O-methyl modified nucleotide
  modified_base 35: mod_base = OTHER; note = 2'-O-methyl modified nucleotide
  modified_base 36: mod_base = OTHER; note = 2'-O-methyl modified nucleotide
  modified_base 37: mod_base = OTHER; note = 2'-O-methyl modified nucleotide
  modified_base 38: mod_base = OTHER; note = 2'-O-methyl modified nucleotide
  modified_base 39: mod_base = OTHER; note = 2'-O-methyl modified nucleotide
  modified_base 40: mod_base = OTHER; note = 2'-O-methyl modified nucleotide
  modified_base 69: mod_base = OTHER; note = 2'-O-methyl modified nucleotide
  modified_base 70: mod_base = OTHER; note = 2'-O-methyl modified nucleotide
  modified_base 71: mod_base = OTHER; note = 2'-O-methyl modified nucleotide
  modified_base 72: mod_base = OTHER; note = 2'-O-methyl modified nucleotide
  modified_base 73: mod_base = OTHER; note = 2'-O-methyl modified nucleotide
  modified_base 74: mod_base = OTHER; note = 2'-O-methyl modified nucleotide
  modified_base 75: mod_base = OTHER; note = 2'-O-methyl modified nucleotide
  modified_base 76: mod_base = OTHER; note = 2'-O-methyl modified nucleotide
  modified_base 77: mod_base = OTHER; note = 2'-O-methyl modified nucleotide
  modified_base 78: mod_base = OTHER; note = 2'-O-methyl modified nucleotide
  modified_base 79: mod_base = OTHER; note = 2'-O-methyl modified nucleotide
  modified_base 80: mod_base = OTHER; note = 2'-O-methyl modified nucleotide
  modified_base 81: mod_base = OTHER; note = 2'-O-methyl modified nucleotide
  modified_base 82: mod_base = OTHER; note = 2'-O-methyl modified nucleotide
  modified_base 83: mod_base = OTHER; note = 2'-O-methyl modified nucleotide
  modified_base 84: mod_base = OTHER; note = 2'-O-methyl modified nucleotide
  modified_base 85: mod_base = OTHER; note = 2'-O-methyl modified nucleotide
  modified_base 86: mod_base = OTHER; note = 2'-O-methyl modified nucleotide
  modified_base 87: mod_base = OTHER; note = 2'-O-methyl modified nucleotide
  modified_base 88: mod_base = OTHER; note = 2'-O-methyl modified nucleotide
  modified_base 89: mod_base = OTHER; note = 2'-O-methyl modified nucleotide
  modified_base 90: mod_base = OTHER; note = 2'-O-methyl modified nucleotide
  modified_base 91: mod_base = OTHER; note = 2'-O-methyl modified nucleotide
  modified_base 92: mod_base = OTHER; note = 2'-O-methyl modified nucleotide
  modified_base 93: mod_base = OTHER; note = 2'-O-methyl modified nucleotide
  modified_base 94: mod_base = OTHER; note = 2'-O-methyl modified nucleotide
  modified_base 95: mod_base = OTHER; note = 2'-O-methyl modified nucleotide
  modified_base 96: mod_base = OTHER; note = 2'-O-methyl modified nucleotide
  modified_base 97: mod_base = OTHER; note = 2'-O-methyl modified nucleotide with phosphorothioate linkage
  modified_base 98: mod_base = OTHER; note = 2'-O-methyl modified nucleotide with phosphorothioate linkage
  modified_base 99: mod_base = OTHER; note = 2'-O-methyl modified nucleotide with phosphorothioate linkage
  modified_base 100: mod_base = OTHER; note = 2'-O-methyl modified nucleotide
  misc_difference 97..100: note = This region may encompass 0-4 nucleotides

SEQ ID NO: 2404 - RNA, 100 nt, synthetic construct; identical to SEQ ID NO: 1404
  source 1..100: mol_type = other RNA
  modified_base 1: mod_base = OTHER; note = 2'-O-methyl modified nucleotide with phosphorothioate linkage
  modified_base 2: mod_base = OTHER; note = 2'-O-methyl modified nucleotide with phosphorothioate linkage
  modified_base 3: mod_base = OTHER; note = 2'-O-methyl modified nucleotide with phosphorothioate linkage
  modified_base 29: mod_base = OTHER; note = 2'-O-methyl modified nucleotide
  modified_base 30: mod_base = OTHER; note = 2'-O-methyl modified nucleotide
  modified_base 31: mod_base = OTHER; note = 2'-O-methyl modified nucleotide
  modified_base 32: mod_base = OTHER; note = 2'-O-methyl modified nucleotide
  modified_base 33: mod_base = OTHER; note = 2'-O-methyl modified nucleotide
  modified_base 34: mod_base = OTHER; note = 2'-O-methyl modified nucleotide
  modified_base 35: mod_base = OTHER; note = 2'-O-methyl modified nucleotide
  modified_base 36: mod_base = OTHER; note = 2'-O-methyl modified nucleotide
  modified_base 37: mod_base = OTHER; note = 2'-O-methyl modified nucleotide
  modified_base 38: mod_base = OTHER; note = 2'-O-methyl modified nucleotide
  modified_base 39: mod_base = OTHER; note = 2'-O-methyl modified nucleotide
  modified_base 40: mod_base = OTHER; note = 2'-O-methyl modified nucleotide
  modified_base 69: mod_base = OTHER; note = 2'-O-methyl modified nucleotide
  modified_base 70: mod_base = OTHER; note = 2'-O-methyl modified nucleotide
  modified_base 71: mod_base = OTHER; note = 2'-O-methyl modified nucleotide
  modified_base 72: mod_base = OTHER; note = 2'-O-methyl modified nucleotide
  modified_base 73: mod_base = OTHER; note = 2'-O-methyl modified nucleotide
  modified_base 74: mod_base = OTHER; note = 2'-O-methyl modified nucleotide
  modified_base 75: mod_base = OTHER; note = 2'-O-methyl modified nucleotide
  modified_base 76: mod_base = OTHER; note = 2'-O-methyl modified nucleotide
  modified_base 77: mod_base = OTHER; note = 2'-O-methyl modified nucleotide
  modified_base 78: mod_base = OTHER; note = 2'-O-methyl modified nucleotide
  modified_base 79: mod_base = OTHER; note = 2'-O-methyl modified nucleotide
  modified_base 80: mod_base = OTHER; note = 2'-O-methyl modified nucleotide
  modified_base 81: mod_base = OTHER; note = 2'-O-methyl modified nucleotide
  modified_base 82: mod_base = OTHER; note = 2'-O-methyl modified nucleotide
  modified_base 83: mod_base = OTHER; note = 2'-O-methyl modified nucleotide
  modified_base 84: mod_base = OTHER; note = 2'-O-methyl modified nucleotide
  modified_base 85: mod_base = OTHER; note = 2'-O-methyl modified nucleotide
  modified_base 86: mod_base = OTHER; note = 2'-O-methyl modified nucleotide
  modified_base 87: mod_base = OTHER; note = 2'-O-methyl modified nucleotide
  modified_base 88: mod_base = OTHER; note = 2'-O-methyl modified nucleotide
  modified_base 89: mod_base = OTHER; note = 2'-O-methyl modified nucleotide
  modified_base 90: mod_base = OTHER; note = 2'-O-methyl modified nucleotide
  modified_base 91: mod_base = OTHER; note = 2'-O-methyl modified nucleotide
  modified_base 92: mod_base = OTHER; note = 2'-O-methyl modified nucleotide
  modified_base 93: mod_base = OTHER; note = 2'-O-methyl modified nucleotide
  modified_base 94: mod_base = OTHER; note = 2'-O-methyl modified nucleotide
  modified_base 95: mod_base = OTHER; note = 2'-O-methyl modified nucleotide
  modified_base 96: mod_base = OTHER; note = 2'-O-methyl modified nucleotide
  modified_base 97: mod_base = OTHER; note = 2'-O-methyl modified nucleotide with phosphorothioate linkage
  modified_base 98: mod_base = OTHER; note = 2'-O-methyl modified nucleotide with phosphorothioate linkage
  modified_base 99: mod_base = OTHER; note = 2'-O-methyl modified nucleotide with phosphorothioate linkage
  modified_base 100: mod_base = OTHER; note = 2'-O-methyl modified nucleotide
  misc_difference 97..100: note = This region may encompass 0-4 nucleotides

SEQ ID NO: 2405 - RNA, 100 nt, synthetic construct; identical to SEQ ID NO: 1405
  source 1..100: mol_type = other RNA
  modified_base 1: mod_base = OTHER; note = 2'-O-methyl modified nucleotide with phosphorothioate linkage
  modified_base 2: mod_base = OTHER; note = 2'-O-methyl modified nucleotide with phosphorothioate linkage
  modified_base 3: mod_base = OTHER; note = 2'-O-methyl modified nucleotide with phosphorothioate linkage
  modified_base 29: mod_base = OTHER; note = 2'-O-methyl modified nucleotide
  modified_base 30: mod_base = OTHER; note = 2'-O-methyl modified nucleotide
  modified_base 31: mod_base = OTHER; note = 2'-O-methyl modified nucleotide
  modified_base 32: mod_base = OTHER; note = 2'-O-methyl modified nucleotide
  modified_base 33: mod_base = OTHER; note = 2'-O-methyl modified nucleotide
  modified_base 34: mod_base = OTHER; note = 2'-O-methyl modified nucleotide
  modified_base 35: mod_base = OTHER; note = 2'-O-methyl modified nucleotide
  modified_base 36: mod_base = OTHER; note = 2'-O-methyl modified nucleotide
  modified_base 37: mod_base = OTHER; note = 2'-O-methyl modified nucleotide
  modified_base 38: mod_base = OTHER; note = 2'-O-methyl modified nucleotide
  modified_base 39: mod_base = OTHER; note = 2'-O-methyl modified nucleotide
  modified_base 40: mod_base = OTHER; note = 2'-O-methyl modified nucleotide
  modified_base 69: mod_base = OTHER; note = 2'-O-methyl modified nucleotide
  modified_base 70: mod_base = OTHER; note = 2'-O-methyl modified nucleotide
  modified_base 71: mod_base = OTHER; note = 2'-O-methyl modified nucleotide
  modified_base 72: mod_base = OTHER; note = 2'-O-methyl modified nucleotide
  modified_base 73: mod_base = OTHER; note = 2'-O-methyl modified nucleotide
  modified_base 74: mod_base = OTHER; note = 2'-O-methyl modified nucleotide
  modified_base 75: mod_base = OTHER; note = 2'-O-methyl modified nucleotide
  modified_base 76: mod_base = OTHER; note = 2'-O-methyl modified nucleotide
  modified_base 77: mod_base = OTHER; note = 2'-O-methyl modified nucleotide
  modified_base 78: mod_base = OTHER; note = 2'-O-methyl modified nucleotide
  modified_base 79: mod_base = OTHER; note = 2'-O-methyl modified nucleotide
  modified_base 80: mod_base = OTHER; note = 2'-O-methyl modified nucleotide
  modified_base 81: mod_base = OTHER; note = 2'-O-methyl modified nucleotide
  modified_base 82: mod_base = OTHER; note = 2'-O-methyl modified nucleotide
  modified_base 83: mod_base = OTHER; note = 2'-O-methyl modified nucleotide
  modified_base 84: mod_base = OTHER; note = 2'-O-methyl modified nucleotide
  modified_base 85: mod_base = OTHER; note = 2'-O-methyl modified nucleotide
  modified_base 86: mod_base = OTHER; note = 2'-O-methyl modified nucleotide
  modified_base 87: mod_base = OTHER; note = 2'-O-methyl modified nucleotide
  modified_base 88: mod_base = OTHER; note = 2'-O-methyl modified nucleotide
  modified_base 89: mod_base = OTHER; note = 2'-O-methyl modified nucleotide
  modified_base 90: mod_base = OTHER; note = 2'-O-methyl modified nucleotide
  modified_base 91: mod_base = OTHER; note = 2'-O-methyl modified nucleotide
  modified_base 92: mod_base = OTHER; note = 2'-O-methyl modified nucleotide
  modified_base 93: mod_base = OTHER; note = 2'-O-methyl modified nucleotide
  modified_base 94: mod_base = OTHER; note = 2'-O-methyl modified nucleotide
  modified_base 95: mod_base = OTHER; note = 2'-O-methyl modified nucleotide
  modified_base 96: mod_base = OTHER; note = 2'-O-methyl modified nucleotide
  modified_base 97: mod_base = OTHER; note = 2'-O-methyl modified nucleotide with phosphorothioate linkage
  modified_base 98: mod_base = OTHER; note = 2'-O-methyl modified nucleotide with phosphorothioate linkage
  modified_base 99: mod_base = OTHER; note = 2'-O-methyl modified nucleotide with phosphorothioate linkage
  modified_base 100: mod_base = OTHER; note = 2'-O-methyl modified nucleotide
  misc_difference 97..100: note = This region may encompass 0-4 nucleotides

SEQ ID NO: 2406 - RNA, 100 nt, synthetic construct; identical to SEQ ID NO: 1406
  source 1..100: mol_type = other RNA
  modified_base 1: mod_base = OTHER; note = 2'-O-methyl modified nucleotide with phosphorothioate linkage
  modified_base 2: mod_base = OTHER; note = 2'-O-methyl modified nucleotide with phosphorothioate linkage
  modified_base 3: mod_base = OTHER; note = 2'-O-methyl modified nucleotide with phosphorothioate linkage
  modified_base 29: mod_base = OTHER; note = 2'-O-methyl modified nucleotide
  modified_base 30: mod_base = OTHER; note = 2'-O-methyl modified nucleotide
  modified_base 31: mod_base = OTHER; note = 2'-O-methyl modified nucleotide
  modified_base 32: mod_base = OTHER; note = 2'-O-methyl modified nucleotide
  modified_base 33: mod_base = OTHER; note = 2'-O-methyl modified nucleotide
  modified_base 34: mod_base = OTHER; note = 2'-O-methyl modified nucleotide
  modified_base 35: mod_base = OTHER; note = 2'-O-methyl modified nucleotide
  modified_base 36: mod_base = OTHER; note = 2'-O-methyl modified nucleotide
  modified_base 37: mod_base = OTHER; note = 2'-O-methyl modified nucleotide
  modified_base 38: mod_base = OTHER; note = 2'-O-methyl modified nucleotide
  modified_base 39: mod_base = OTHER; note = 2'-O-methyl modified nucleotide
  modified_base 40: mod_base = OTHER; note = 2'-O-methyl modified nucleotide
  modified_base 69: mod_base = OTHER; note = 2'-O-methyl modified nucleotide
  modified_base 70: mod_base = OTHER; note = 2'-O-methyl modified nucleotide
  modified_base 71: mod_base = OTHER; note = 2'-O-methyl modified nucleotide
  modified_base 72: mod_base = OTHER; note = 2'-O-methyl modified nucleotide
  modified_base 73: mod_base = OTHER; note = 2'-O-methyl modified nucleotide
  modified_base 74: mod_base = OTHER; note = 2'-O-methyl modified nucleotide
  modified_base 75: mod_base = OTHER; note = 2'-O-methyl modified nucleotide
  modified_base 76: mod_base = OTHER; note = 2'-O-methyl modified nucleotide
  modified_base 77: mod_base = OTHER; note = 2'-O-methyl modified nucleotide
  modified_base 78: mod_base = OTHER; note = 2'-O-methyl modified nucleotide
  modified_base 79: mod_base = OTHER; note = 2'-O-methyl modified nucleotide
  modified_base 80: mod_base = OTHER; note = 2'-O-methyl modified nucleotide
  modified_base 81: mod_base = OTHER; note = 2'-O-methyl modified nucleotide
  modified_base 82: mod_base = OTHER; note = 2'-O-methyl modified nucleotide
  modified_base 83: mod_base = OTHER; note = 2'-O-methyl modified nucleotide
  modified_base 84: mod_base = OTHER; note = 2'-O-methyl modified nucleotide
  modified_base 85: mod_base = OTHER; note = 2'-O-methyl modified nucleotide
  modified_base 86: mod_base = OTHER; note = 2'-O-methyl modified nucleotide
  modified_base 87: mod_base = OTHER; note = 2'-O-methyl modified nucleotide
  modified_base 88: mod_base = OTHER; note = 2'-O-methyl modified nucleotide
  modified_base 89: mod_base = OTHER; note = 2'-O-methyl modified nucleotide
  modified_base 90: mod_base = OTHER; note = 2'-O-methyl modified nucleotide
  modified_base 91: mod_base = OTHER; note = 2'-O-methyl modified nucleotide
  modified_base 92: mod_base = OTHER; note = 2'-O-methyl modified nucleotide
  modified_base 93: mod_base = OTHER; note = 2'-O-methyl modified nucleotide
  modified_base 94: mod_base = OTHER; note = 2'-O-methyl modified nucleotide
  modified_base 95: mod_base = OTHER; note = 2'-O-methyl modified nucleotide
  modified_base 96: mod_base = OTHER; note = 2'-O-methyl modified nucleotide
  modified_base 97: mod_base = OTHER; note = 2'-O-methyl modified nucleotide with phosphorothioate linkage
  modified_base 98: mod_base = OTHER; note = 2'-O-methyl modified nucleotide with phosphorothioate linkage
  modified_base 99: mod_base = OTHER; note = 2'-O-methyl modified nucleotide with phosphorothioate linkage
  modified_base 100: mod_base = OTHER; note = 2'-O-methyl modified nucleotide
  misc_difference 97..100: note = This region may encompass 0-4 nucleotides

SEQ ID NO: 2407 - RNA, 100 nt, synthetic construct; identical to SEQ ID NO: 1407
  source 1..100: mol_type = other RNA
  modified_base 1: mod_base = OTHER; note = 2'-O-methyl modified nucleotide with phosphorothioate linkage
  modified_base 2: mod_base = OTHER; note = 2'-O-methyl modified nucleotide with phosphorothioate linkage
  modified_base 3: mod_base = OTHER; note = 2'-O-methyl modified nucleotide with phosphorothioate linkage
  modified_base 29: mod_base = OTHER; note = 2'-O-methyl modified nucleotide
  modified_base 30: mod_base = OTHER; note = 2'-O-methyl modified nucleotide
  modified_base 31: mod_base = OTHER; note = 2'-O-methyl modified nucleotide
  modified_base 32: mod_base = OTHER; note = 2'-O-methyl modified nucleotide
  modified_base 33: mod_base = OTHER; note = 2'-O-methyl modified nucleotide
  modified_base 34: mod_base = OTHER; note = 2'-O-methyl modified nucleotide
  modified_base 35: mod_base = OTHER; note = 2'-O-methyl modified nucleotide
  modified_base 36: mod_base = OTHER; note = 2'-O-methyl modified nucleotide
  modified_base 37: mod_base = OTHER; note = 2'-O-methyl modified nucleotide
  modified_base 38: mod_base = OTHER; note = 2'-O-methyl modified nucleotide
  modified_base 39: mod_base = OTHER; note = 2'-O-methyl modified nucleotide
  modified_base 40: mod_base = OTHER; note = 2'-O-methyl modified nucleotide
  modified_base 69: mod_base = OTHER; note = 2'-O-methyl modified nucleotide
  modified_base 70: mod_base = OTHER; note = 2'-O-methyl modified nucleotide
  modified_base 71: mod_base = OTHER; note = 2'-O-methyl modified nucleotide
  modified_base 72: mod_base = OTHER; note = 2'-O-methyl modified nucleotide
  modified_base 73: mod_base = OTHER; note = 2'-O-methyl modified nucleotide
  modified_base 74: mod_base = OTHER; note = 2'-O-methyl modified nucleotide
  modified_base 75: mod_base = OTHER; note = 2'-O-methyl modified nucleotide
  modified_base 76: mod_base = OTHER; note = 2'-O-methyl modified nucleotide
  modified_base 77: mod_base = OTHER; note = 2'-O-methyl modified nucleotide
  modified_base 78: mod_base = OTHER; note = 2'-O-methyl modified nucleotide
  modified_base 79: mod_base = OTHER; note = 2'-O-methyl modified nucleotide
  modified_base 80: mod_base = OTHER; note = 2'-O-methyl modified nucleotide
  modified_base 81: mod_base = OTHER; note = 2'-O-methyl modified nucleotide
  modified_base 82: mod_base = OTHER; note = 2'-O-methyl modified nucleotide
  modified_base 83: mod_base = OTHER; note = 2'-O-methyl modified nucleotide
  modified_base 84: mod_base = OTHER; note = 2'-O-methyl modified nucleotide
  modified_base 85: mod_base = OTHER; note = 2'-O-methyl modified nucleotide
  modified_base 86: mod_base = OTHER; note = 2'-O-methyl modified nucleotide
  modified_base 87: mod_base = OTHER; note = 2'-O-methyl modified nucleotide
  modified_base 88: mod_base = OTHER; note = 2'-O-methyl modified nucleotide
  modified_base 89: mod_base = OTHER; note = 2'-O-methyl modified nucleotide
  modified_base 90: mod_base = OTHER; note = 2'-O-methyl modified nucleotide
  modified_base 91: mod_base = OTHER; note = 2'-O-methyl modified nucleotide
  modified_base 92: mod_base = OTHER; note = 2'-O-methyl modified nucleotide
  modified_base 93: mod_base = OTHER; note = 2'-O-methyl modified nucleotide
  modified_base 94: mod_base = OTHER; note = 2'-O-methyl modified nucleotide
  modified_base 95: mod_base = OTHER; note = 2'-O-methyl modified nucleotide
  modified_base 96: mod_base = OTHER; note = 2'-O-methyl modified nucleotide
  modified_base 97: mod_base = OTHER; note = 2'-O-methyl modified nucleotide with phosphorothioate linkage
  modified_base 98: mod_base = OTHER; note = 2'-O-methyl modified nucleotide with phosphorothioate linkage
  modified_base 99: mod_base = OTHER; note = 2'-O-methyl modified nucleotide with phosphorothioate linkage
  modified_base 100: mod_base = OTHER; note = 2'-O-methyl modified nucleotide
  misc_difference 97..100: note = This region may encompass 0-4 nucleotides

SEQ ID NO: 2408 - RNA, 100 nt, synthetic construct; identical to SEQ ID NO: 1408
  source 1..100: mol_type = other RNA
  modified_base 1: mod_base = OTHER; note = 2'-O-methyl modified nucleotide with phosphorothioate linkage
  modified_base 2: mod_base = OTHER; note = 2'-O-methyl modified nucleotide with phosphorothioate linkage
  modified_base 3: mod_base = OTHER; note = 2'-O-methyl modified nucleotide with phosphorothioate linkage
  modified_base 29: mod_base = OTHER; note = 2'-O-methyl modified nucleotide
  modified_base 30: mod_base = OTHER; note = 2'-O-methyl modified nucleotide
  modified_base 31: mod_base = OTHER; note = 2'-O-methyl modified nucleotide
  modified_base 32: mod_base = OTHER; note = 2'-O-methyl modified nucleotide
  modified_base 33: mod_base = OTHER; note = 2'-O-methyl modified nucleotide
  modified_base 34: mod_base = OTHER; note = 2'-O-methyl modified nucleotide
  modified_base 35: mod_base = OTHER; note = 2'-O-methyl modified nucleotide
  modified_base 36: mod_base = OTHER; note = 2'-O-methyl modified nucleotide
  modified_base 37: mod_base = OTHER; note = 2'-O-methyl modified nucleotide
  modified_base 38: mod_base = OTHER; note = 2'-O-methyl modified nucleotide
  modified_base 39: mod_base = OTHER; note = 2'-O-methyl modified nucleotide
  modified_base 40: mod_base = OTHER; note = 2'-O-methyl modified nucleotide
  modified_base 69: mod_base = OTHER; note = 2'-O-methyl modified nucleotide
  modified_base 70: mod_base = OTHER; note = 2'-O-methyl modified nucleotide
  modified_base 71: mod_base = OTHER; note = 2'-O-methyl modified nucleotide
  modified_base 72: mod_base = OTHER; note = 2'-O-methyl modified nucleotide
  modified_base 73: mod_base = OTHER; note = 2'-O-methyl modified nucleotide
  modified_base 74: mod_base = OTHER; note = 2'-O-methyl modified nucleotide
  modified_base 75: mod_base = OTHER; note = 2'-O-methyl modified nucleotide
  modified_base 76: mod_base = OTHER; note = 2'-O-methyl modified nucleotide
  modified_base 77: mod_base = OTHER; note = 2'-O-methyl modified nucleotide
  modified_base 78: mod_base = OTHER; note = 2'-O-methyl modified nucleotide
  modified_base 79: mod_base = OTHER; note = 2'-O-methyl modified nucleotide
  modified_base 80: mod_base = OTHER; note = 2'-O-methyl modified nucleotide
  modified_base 81: mod_base = OTHER; note = 2'-O-methyl modified nucleotide
  modified_base 82: mod_base = OTHER; note = 2'-O-methyl modified nucleotide
  modified_base 83: mod_base = OTHER; note = 2'-O-methyl modified nucleotide
  modified_base 84: mod_base = OTHER; note = 2'-O-methyl modified nucleotide
  modified_base 85: mod_base = OTHER; note = 2'-O-methyl modified nucleotide
  modified_base 86: mod_base = OTHER; note = 2'-O-methyl modified nucleotide
  modified_base 87: mod_base = OTHER; note = 2'-O-methyl modified nucleotide
  modified_base 88: mod_base = OTHER; note = 2'-O-methyl modified nucleotide
  modified_base 89: mod_base = OTHER; note = 2'-O-methyl modified nucleotide
  modified_base 90: mod_base = OTHER; note = 2'-O-methyl modified nucleotide
  modified_base 91: mod_base = OTHER; note = 2'-O-methyl modified nucleotide
  modified_base 92: mod_base = OTHER; note = 2'-O-methyl modified nucleotide
  modified_base 93: mod_base = OTHER; note = 2'-O-methyl modified nucleotide
  modified_base 94: mod_base = OTHER; note = 2'-O-methyl modified nucleotide
  modified_base 95: mod_base = OTHER; note = 2'-O-methyl modified nucleotide
  modified_base 96: mod_base = OTHER; note = 2'-O-methyl modified nucleotide
  modified_base 97: mod_base = OTHER; note = 2'-O-methyl modified nucleotide with phosphorothioate linkage
  modified_base 98: mod_base = OTHER; note = 2'-O-methyl modified nucleotide with phosphorothioate linkage
  modified_base 99: mod_base = OTHER; note = 2'-O-methyl modified nucleotide with phosphorothioate linkage
  modified_base 100: mod_base = OTHER; note = 2'-O-methyl modified nucleotide
  misc_difference 97..100: note = This region may encompass 0-4 nucleotides

SEQ ID NO: 2409 - RNA, 100 nt, synthetic construct; identical to SEQ ID NO: 1409
  source 1..100: mol_type = other RNA
  modified_base 1: mod_base = OTHER; note = 2'-O-methyl modified nucleotide with phosphorothioate linkage
  modified_base 2: mod_base = OTHER; note = 2'-O-methyl modified nucleotide with phosphorothioate linkage
  modified_base 3: mod_base = OTHER; note = 2'-O-methyl modified nucleotide with phosphorothioate linkage
  modified_base 29: mod_base = OTHER; note = 2'-O-methyl modified nucleotide
  modified_base 30: mod_base = OTHER; note = 2'-O-methyl modified nucleotide
  modified_base 31: mod_base = OTHER; note = 2'-O-methyl modified nucleotide
  modified_base 32: mod_base = OTHER; note = 2'-O-methyl modified nucleotide
  modified_base 33: mod_base = OTHER; note = 2'-O-methyl modified nucleotide
  modified_base 34: mod_base = OTHER; note = 2'-O-methyl modified nucleotide
  modified_base 35: mod_base = OTHER; note = 2'-O-methyl modified nucleotide
  modified_base 36: mod_base = OTHER; note = 2'-O-methyl modified nucleotide
  modified_base 37: mod_base = OTHER; note = 2'-O-methyl modified nucleotide
  modified_base 38: mod_base = OTHER; note = 2'-O-methyl modified nucleotide
  modified_base 39: mod_base = OTHER; note = 2'-O-methyl modified nucleotide
  modified_base 40: mod_base = OTHER; note = 2'-O-methyl modified nucleotide
  modified_base 69: mod_base = OTHER; note = 2'-O-methyl modified nucleotide
  modified_base 70: mod_base = OTHER; note = 2'-O-methyl modified nucleotide
  modified_base 71: mod_base = OTHER; note = 2'-O-methyl modified nucleotide
  modified_base 72: mod_base = OTHER; note = 2'-O-methyl modified nucleotide
  modified_base 73: mod_base = OTHER; note = 2'-O-methyl modified nucleotide
  modified_base 74: mod_base = OTHER; note = 2'-O-methyl modified nucleotide
  modified_base 75: mod_base = OTHER; note = 2'-O-methyl modified nucleotide
  modified_base 76: mod_base = OTHER; note = 2'-O-methyl modified nucleotide
  modified_base 77: mod_base = OTHER; note = 2'-O-methyl modified nucleotide
  modified_base 78: mod_base = OTHER; note = 2'-O-methyl modified nucleotide
  modified_base 79: mod_base = OTHER; note = 2'-O-methyl modified nucleotide
  modified_base 80: mod_base = OTHER; note = 2'-O-methyl modified nucleotide
  modified_base 81: mod_base = OTHER; note = 2'-O-methyl modified nucleotide
  modified_base 82: mod_base = OTHER; note = 2'-O-methyl modified nucleotide
  modified_base 83: mod_base = OTHER; note = 2'-O-methyl modified nucleotide
  modified_base 84: mod_base = OTHER; note = 2'-O-methyl modified nucleotide
  modified_base 85: mod_base = OTHER; note = 2'-O-methyl modified nucleotide
  modified_base 86: mod_base = OTHER; note = 2'-O-methyl modified nucleotide
  modified_base 87: mod_base = OTHER; note = 2'-O-methyl modified nucleotide
  modified_base 88: mod_base = OTHER; note = 2'-O-methyl modified nucleotide
  modified_base 89: mod_base = OTHER; note = 2'-O-methyl modified nucleotide
  modified_base 90: mod_base = OTHER; note = 2'-O-methyl modified nucleotide
  modified_base 91: mod_base = OTHER; note = 2'-O-methyl modified nucleotide
  modified_base 92: mod_base = OTHER; note = 2'-O-methyl modified nucleotide
  modified_base 93: mod_base = OTHER; note = 2'-O-methyl modified nucleotide
  modified_base 94: mod_base = OTHER; note = 2'-O-methyl modified nucleotide
  modified_base 95: mod_base = OTHER; note = 2'-O-methyl modified nucleotide
  modified_base 96: mod_base = OTHER; note = 2'-O-methyl modified nucleotide
  modified_base 97: mod_base = OTHER; note = 2'-O-methyl modified nucleotide with phosphorothioate linkage
  modified_base 98: mod_base = OTHER; note = 2'-O-methyl modified nucleotide with phosphorothioate linkage
  modified_base 99: mod_base = OTHER; note = 2'-O-methyl modified nucleotide with phosphorothioate linkage
  modified_base 100: mod_base = OTHER; note = 2'-O-methyl modified nucleotide
  misc_difference 97..100: note = This region may encompass 0-4 nucleotides

SEQ ID NO: 2410 - RNA, 100 nt, synthetic construct; identical to SEQ ID NO: 1410
  source 1..100: mol_type = other RNA
  modified_base 1: mod_base = OTHER; note = 2'-O-methyl modified nucleotide with phosphorothioate linkage
  modified_base 2: mod_base = OTHER; note = 2'-O-methyl modified nucleotide with phosphorothioate linkage
  modified_base 3: mod_base = OTHER; note = 2'-O-methyl modified nucleotide with phosphorothioate linkage
  modified_base 29: mod_base = OTHER; note = 2'-O-methyl modified nucleotide
  modified_base 30: mod_base = OTHER; note = 2'-O-methyl modified nucleotide
  modified_base 31: mod_base = OTHER; note = 2'-O-methyl modified nucleotide
  modified_base 32: mod_base = OTHER; note = 2'-O-methyl modified nucleotide
  modified_base 33: mod_base = OTHER; note = 2'-O-methyl modified nucleotide
  modified_base 34: mod_base = OTHER; note = 2'-O-methyl modified nucleotide
  modified_base 35: mod_base = OTHER; note = 2'-O-methyl modified nucleotide
  modified_base 36: mod_base = OTHER; note = 2'-O-methyl modified nucleotide
  modified_base 37: mod_base = OTHER; note = 2'-O-methyl modified nucleotide
  modified_base 38: mod_base = OTHER; note = 2'-O-methyl modified nucleotide
  modified_base 39: mod_base = OTHER; note = 2'-O-methyl modified nucleotide
  modified_base 40: mod_base = OTHER; note = 2'-O-methyl modified nucleotide
  modified_base 69: mod_base = OTHER; note = 2'-O-methyl modified nucleotide
  modified_base 70: mod_base = OTHER; note = 2'-O-methyl modified nucleotide
  modified_base 71: mod_base = OTHER; note = 2'-O-methyl modified nucleotide
  modified_base 72: mod_base = OTHER; note = 2'-O-methyl modified nucleotide
  modified_base 73: mod_base = OTHER; note = 2'-O-methyl modified nucleotide
  modified_base 74: mod_base = OTHER; note = 2'-O-methyl modified nucleotide
  modified_base 75: mod_base = OTHER; note = 2'-O-methyl modified nucleotide
  modified_base 76: mod_base = OTHER; note = 2'-O-methyl modified nucleotide
  modified_base 77: mod_base = OTHER; note = 2'-O-methyl modified nucleotide
  modified_base 78: mod_base = OTHER; note = 2'-O-methyl modified nucleotide
  modified_base 79: mod_base = OTHER; note = 2'-O-methyl modified nucleotide
  modified_base 80: mod_base = OTHER; note = 2'-O-methyl modified nucleotide
  modified_base 81: mod_base = OTHER; note = 2'-O-methyl modified nucleotide
  modified_base 82: mod_base = OTHER; note = 2'-O-methyl modified nucleotide
  modified_base 83: mod_base = OTHER; note = 2'-O-methyl modified nucleotide
  modified_base 84: mod_base = OTHER; note = 2'-O-methyl modified nucleotide
  modified_base 85: mod_base = OTHER; note = 2'-O-methyl modified nucleotide
  modified_base 86: mod_base = OTHER; note = 2'-O-methyl modified nucleotide
  modified_base 87: mod_base = OTHER; note = 2'-O-methyl modified nucleotide
  modified_base 88: mod_base = OTHER; note = 2'-O-methyl modified nucleotide
  modified_base 89: mod_base = OTHER; note = 2'-O-methyl modified nucleotide
  modified_base 90: mod_base = OTHER; note = 2'-O-methyl modified nucleotide
  modified_base 91: mod_base = OTHER; note = 2'-O-methyl modified nucleotide
  modified_base 92: mod_base = OTHER; note = 2'-O-methyl modified nucleotide
  modified_base 93: mod_base = OTHER; note = 2'-O-methyl modified nucleotide
  modified_base 94: mod_base = OTHER; note = 2'-O-methyl modified nucleotide
  modified_base 95: mod_base = OTHER; note = 2'-O-methyl modified nucleotide
  modified_base 96: mod_base = OTHER; note = 2'-O-methyl modified nucleotide
  modified_base 97: mod_base = OTHER; note = 2'-O-methyl modified nucleotide with phosphorothioate linkage
  modified_base 98: mod_base = OTHER; note = 2'-O-methyl modified nucleotide with phosphorothioate linkage
  modified_base 99: mod_base = OTHER; note = 2'-O-methyl modified nucleotide with phosphorothioate linkage
  modified_base 100: mod_base = OTHER; note = 2'-O-methyl modified nucleotide
  misc_difference 97..100: note = This region may encompass 0-4 nucleotides

SEQ ID NO: 2411 - RNA, 100 nt, synthetic construct; identical to SEQ ID NO: 1411
  source 1..100: mol_type = other RNA
  modified_base 1: mod_base = OTHER; note = 2'-O-methyl modified nucleotide with phosphorothioate linkage
  modified_base 2: mod_base = OTHER; note = 2'-O-methyl modified nucleotide with phosphorothioate linkage
  modified_base 3: mod_base = OTHER; note = 2'-O-methyl modified nucleotide with phosphorothioate linkage
  modified_base 29: mod_base = OTHER; note = 2'-O-methyl modified nucleotide
  modified_base 30: mod_base = OTHER; note = 2'-O-methyl modified nucleotide
  modified_base 31: mod_base = OTHER; note = 2'-O-methyl modified nucleotide
  modified_base 32: mod_base = OTHER; note = 2'-O-methyl modified nucleotide
  modified_base 33: mod_base = OTHER; note = 2'-O-methyl modified nucleotide
  modified_base 34: mod_base = OTHER; note = 2'-O-methyl modified nucleotide
  modified_base 35: mod_base = OTHER; note = 2'-O-methyl modified nucleotide
  modified_base 36: mod_base = OTHER; note = 2'-O-methyl modified nucleotide
  modified_base 37: mod_base = OTHER; note = 2'-O-methyl modified nucleotide
  modified_base 38: mod_base = OTHER; note = 2'-O-methyl modified nucleotide
  modified_base 39: mod_base = OTHER; note = 2'-O-methyl modified nucleotide
  modified_base 40: mod_base = OTHER; note = 2'-O-methyl modified nucleotide
  modified_base 69: mod_base = OTHER; note = 2'-O-methyl modified nucleotide
  modified_base 70: mod_base = OTHER; note = 2'-O-methyl modified nucleotide
  modified_base 71: mod_base = OTHER; note = 2'-O-methyl modified nucleotide
  modified_base 72: mod_base = OTHER; note = 2'-O-methyl modified nucleotide
  modified_base 73: mod_base = OTHER; note = 2'-O-methyl modified nucleotide
  modified_base 74: mod_base = OTHER; note = 2'-O-methyl modified nucleotide
  modified_base 75: mod_base = OTHER; note = 2'-O-methyl modified nucleotide
  modified_base 76: mod_base = OTHER; note = 2'-O-methyl modified nucleotide
  modified_base 77: mod_base = OTHER; note = 2'-O-methyl modified nucleotide
  modified_base 78: mod_base = OTHER; note = 2'-O-methyl modified nucleotide
  modified_base 79: mod_base = OTHER; note = 2'-O-methyl modified nucleotide
  modified_base 80: mod_base = OTHER; note = 2'-O-methyl modified nucleotide
  modified_base 81: mod_base = OTHER; note = 2'-O-methyl modified nucleotide
  modified_base 82: mod_base = OTHER; note = 2'-O-methyl modified nucleotide
  modified_base 83: mod_base = OTHER; note = 2'-O-methyl modified nucleotide
  modified_base 84: mod_base = OTHER; note = 2'-O-methyl modified nucleotide
  modified_base 85: mod_base = OTHER; note = 2'-O-methyl modified nucleotide
  modified_base 86: mod_base = OTHER; note = 2'-O-methyl modified nucleotide
  modified_base 87: mod_base = OTHER; note = 2'-O-methyl modified nucleotide
  modified_base 88: mod_base = OTHER; note = 2'-O-methyl modified nucleotide
  modified_base 89: mod_base = OTHER; note = 2'-O-methyl modified nucleotide
  modified_base 90: mod_base = OTHER; note = 2'-O-methyl modified nucleotide
  modified_base 91: mod_base = OTHER; note = 2'-O-methyl modified nucleotide
  modified_base 92: mod_base = OTHER; note = 2'-O-methyl modified nucleotide
  modified_base 93: mod_base = OTHER; note = 2'-O-methyl modified nucleotide
  modified_base 94: mod_base = OTHER; note = 2'-O-methyl modified nucleotide
  modified_base 95: mod_base = OTHER; note = 2'-O-methyl modified nucleotide
  modified_base 96: mod_base = OTHER; note = 2'-O-methyl modified nucleotide
  modified_base 97: mod_base = OTHER; note = 2'-O-methyl modified nucleotide with phosphorothioate linkage
  modified_base 98: mod_base = OTHER; note = 2'-O-methyl modified nucleotide with phosphorothioate linkage
  modified_base 99: mod_base = OTHER; note = 2'-O-methyl modified nucleotide with phosphorothioate linkage
  modified_base 100: mod_base = OTHER; note = 2'-O-methyl modified nucleotide
  misc_difference 97..100: note = This region may encompass 0-4 nucleotides

SEQ ID NO: 2412 - RNA, 100 nt, synthetic construct; identical to SEQ ID NO: 1412
  source 1..100: mol_type = other RNA
  modified_base 1: mod_base = OTHER; note = 2'-O-methyl modified nucleotide with phosphorothioate linkage
  modified_base 2: mod_base = OTHER; note = 2'-O-methyl modified nucleotide with phosphorothioate linkage
  modified_base 3: mod_base = OTHER; note = 2'-O-methyl modified nucleotide with phosphorothioate linkage
  modified_base 29: mod_base = OTHER; note = 2'-O-methyl modified nucleotide
  modified_base 30: mod_base = OTHER; note = 2'-O-methyl modified nucleotide
  modified_base 31: mod_base = OTHER; note = 2'-O-methyl modified nucleotide
  modified_base 32: mod_base = OTHER; note = 2'-O-methyl modified nucleotide
  modified_base 33: mod_base = OTHER; note = 2'-O-methyl modified nucleotide
  modified_base 34: mod_base = OTHER; note = 2'-O-methyl modified nucleotide
  modified_base 35: mod_base = OTHER; note = 2'-O-methyl modified nucleotide
  modified_base 36: mod_base = OTHER; note = 2'-O-methyl modified nucleotide
  modified_base 37: mod_base = OTHER; note = 2'-O-methyl modified nucleotide
  modified_base 38: mod_base = OTHER; note = 2'-O-methyl modified nucleotide
  modified_base 39: mod_base = OTHER; note = 2'-O-methyl modified nucleotide
  modified_base 40: mod_base = OTHER; note = 2'-O-methyl modified nucleotide
  modified_base 69: mod_base = OTHER; note = 2'-O-methyl modified nucleotide
  modified_base 70: mod_base = OTHER; note = 2'-O-methyl modified nucleotide
  modified_base 71: mod_base = OTHER; note = 2'-O-methyl modified nucleotide
  modified_base 72: mod_base = OTHER; note = 2'-O-methyl modified nucleotide
  modified_base 73: mod_base = OTHER; note = 2'-O-methyl modified nucleotide
  modified_base 74: mod_base = OTHER; note = 2'-O-methyl modified nucleotide
  modified_base 75: mod_base = OTHER; note = 2'-O-methyl modified nucleotide
  modified_base 76: mod_base = OTHER; note = 2'-O-methyl modified nucleotide
  modified_base 77: mod_base = OTHER; note = 2'-O-methyl modified nucleotide
  modified_base 78: mod_base = OTHER; note = 2'-O-methyl modified nucleotide
  modified_base 79: mod_base = OTHER; note = 2'-O-methyl modified nucleotide
  modified_base 80: mod_base = OTHER; note = 2'-O-methyl modified nucleotide
  modified_base 81: mod_base = OTHER; note = 2'-O-methyl modified nucleotide
  modified_base 82: mod_base = OTHER; note = 2'-O-methyl modified nucleotide
  modified_base 83: mod_base = OTHER; note = 2'-O-methyl modified nucleotide
  modified_base 84: mod_base = OTHER; note = 2'-O-methyl modified nucleotide
  modified_base 85: mod_base = OTHER; note = 2'-O-methyl modified nucleotide
  modified_base 86: mod_base = OTHER; note = 2'-O-methyl modified nucleotide
  modified_base 87: mod_base = OTHER; note = 2'-O-methyl modified nucleotide
  modified_base 88: mod_base = OTHER; note = 2'-O-methyl modified nucleotide
  modified_base 89: mod_base = OTHER; note = 2'-O-methyl modified nucleotide
  modified_base 90: mod_base = OTHER; note = 2'-O-methyl modified nucleotide
  modified_base 91: mod_base = OTHER; note = 2'-O-methyl modified nucleotide
  modified_base 92: mod_base = OTHER; note = 2'-O-methyl modified nucleotide
  modified_base 93: mod_base = OTHER; note = 2'-O-methyl modified nucleotide
  modified_base 94: mod_base = OTHER; note = 2'-O-methyl modified nucleotide
  modified_base 95: mod_base = OTHER; note = 2'-O-methyl modified nucleotide
  modified_base 96: mod_base = OTHER; note = 2'-O-methyl modified nucleotide
  modified_base 97: mod_base = OTHER; note = 2'-O-methyl modified nucleotide with phosphorothioate linkage
  modified_base 98: mod_base = OTHER; note = 2'-O-methyl modified nucleotide with phosphorothioate linkage
  modified_base 99: mod_base = OTHER; note = 2'-O-methyl modified nucleotide with phosphorothioate linkage
  modified_base 100: mod_base = OTHER; note = 2'-O-methyl modified nucleotide
  misc_difference 97..100: note = This region may encompass 0-4 nucleotides

SEQ ID NO: 2413 - RNA, 100 nt, synthetic construct; identical to SEQ ID NO: 1413
  source 1..100: mol_type = other RNA
  modified_base 1: mod_base = OTHER; note = 2'-O-methyl modified nucleotide with phosphorothioate linkage
  modified_base 2: mod_base = OTHER; note = 2'-O-methyl modified nucleotide with phosphorothioate linkage
  modified_base 3: mod_base = OTHER; note = 2'-O-methyl modified nucleotide with phosphorothioate linkage
  modified_base 29: mod_base = OTHER; note = 2'-O-methyl modified nucleotide
  modified_base 30: mod_base = OTHER; note = 2'-O-methyl modified nucleotide
  modified_base 31: mod_base = OTHER; note = 2'-O-methyl modified nucleotide
  modified_base 32: mod_base = OTHER; note = 2'-O-methyl modified nucleotide
  modified_base 33: mod_base = OTHER; note = 2'-O-methyl modified nucleotide
  modified_base 34: mod_base = OTHER; note = 2'-O-methyl modified nucleotide
  modified_base 35: mod_base = OTHER; note = 2'-O-methyl modified nucleotide
  modified_base 36: mod_base = OTHER; note = 2'-O-methyl modified nucleotide
  modified_base 37: mod_base = OTHER; note = 2'-O-methyl modified nucleotide
  modified_base 38: mod_base = OTHER; note = 2'-O-methyl modified nucleotide
  modified_base 39: mod_base = OTHER; note = 2'-O-methyl modified nucleotide
  modified_base 40: mod_base = OTHER; note = 2'-O-methyl modified nucleotide
  modified_base 69: mod_base = OTHER; note = 2'-O-methyl modified nucleotide
  modified_base 70: mod_base = OTHER; note = 2'-O-methyl modified nucleotide
  modified_base 71: mod_base = OTHER; note = 2'-O-methyl modified nucleotide
  modified_base 72: mod_base = OTHER; note = 2'-O-methyl modified nucleotide
  modified_base 73: mod_base = OTHER; note = 2'-O-methyl modified nucleotide
  modified_base 74: mod_base = OTHER; note = 2'-O-methyl modified nucleotide
  modified_base 75: mod_base = OTHER; note = 2'-O-methyl modified nucleotide
  modified_base 76: mod_base = OTHER; note = 2'-O-methyl modified nucleotide
  modified_base 77: mod_base = OTHER; note = 2'-O-methyl modified nucleotide
  modified_base 78: mod_base = OTHER; note = 2'-O-methyl modified nucleotide
  modified_base 79: mod_base = OTHER; note = 2'-O-methyl modified nucleotide
  modified_base 80: mod_base = OTHER; note = 2'-O-methyl modified nucleotide
  modified_base 81: mod_base = OTHER; note = 2'-O-methyl modified nucleotide
  modified_base 82: mod_base = OTHER; note = 2'-O-methyl modified nucleotide
  modified_base 83: mod_base = OTHER; note = 2'-O-methyl modified nucleotide
  modified_base 84: mod_base = OTHER; note = 2'-O-methyl modified nucleotide
  modified_base 85: mod_base = OTHER; note = 2'-O-methyl modified nucleotide
  modified_base 86: mod_base = OTHER; note = 2'-O-methyl modified nucleotide
  modified_base 87: mod_base = OTHER; note = 2'-O-methyl modified nucleotide
  modified_base 88: mod_base = OTHER; note = 2'-O-methyl modified nucleotide
  modified_base 89: mod_base = OTHER; note = 2'-O-methyl modified nucleotide
  modified_base 90: mod_base = OTHER; note = 2'-O-methyl modified nucleotide
  modified_base 91: mod_base = OTHER; note = 2'-O-methyl modified nucleotide
  modified_base 92: mod_base = OTHER; note = 2'-O-methyl modified nucleotide
  modified_base 93: mod_base = OTHER; note = 2'-O-methyl modified nucleotide
  modified_base 94: mod_base = OTHER; note = 2'-O-methyl modified nucleotide
  modified_base 95: mod_base = OTHER; note = 2'-O-methyl modified nucleotide
  modified_base 96: mod_base = OTHER; note = 2'-O-methyl modified nucleotide
  modified_base 97: mod_base = OTHER; note = 2'-O-methyl modified nucleotide with phosphorothioate linkage
  modified_base 98: mod_base = OTHER; note = 2'-O-methyl modified nucleotide with phosphorothioate linkage
  modified_base 99: mod_base = OTHER; note = 2'-O-methyl modified nucleotide with phosphorothioate linkage
  modified_base 100: mod_base = OTHER; note = 2'-O-methyl modified nucleotide
  misc_difference 97..100: note = This region may encompass 0-4 nucleotides

SEQ ID NO: 2414 - RNA, 100 nt, synthetic construct; identical to SEQ ID NO: 1414
  source 1..100: mol_type = other RNA
  modified_base 1: mod_base = OTHER; note = 2'-O-methyl modified nucleotide with phosphorothioate linkage
  modified_base 2: mod_base = OTHER; note = 2'-O-methyl modified nucleotide with phosphorothioate linkage
  modified_base 3: mod_base = OTHER; note = 2'-O-methyl modified nucleotide with phosphorothioate linkage
  modified_base 29: mod_base = OTHER; note = 2'-O-methyl modified nucleotide
  modified_base 30: mod_base = OTHER; note = 2'-O-methyl modified nucleotide
  modified_base 31: mod_base = OTHER; note = 2'-O-methyl modified nucleotide
  modified_base 32: mod_base = OTHER; note = 2'-O-methyl modified nucleotide
  modified_base 33: mod_base = OTHER; note = 2'-O-methyl modified nucleotide
  modified_base 34: mod_base = OTHER; note = 2'-O-methyl modified nucleotide
  modified_base 35: mod_base = OTHER; note = 2'-O-methyl modified nucleotide
  modified_base 36: mod_base = OTHER; note = 2'-O-methyl modified nucleotide
  modified_base 37: mod_base = OTHER; note = 2'-O-methyl modified nucleotide
  modified_base 38: mod_base = OTHER; note = 2'-O-methyl modified nucleotide
  modified_base 39: mod_base = OTHER; note = 2'-O-methyl modified nucleotide
  modified_base 40: mod_base = OTHER; note = 2'-O-methyl modified nucleotide
  modified_base 69: mod_base = OTHER; note = 2'-O-methyl modified nucleotide
  modified_base 70: mod_base = OTHER; note = 2'-O-methyl modified nucleotide
  modified_base 71: mod_base = OTHER; note = 2'-O-methyl modified nucleotide
  modified_base 72: mod_base = OTHER; note = 2'-O-methyl modified nucleotide
  modified_base 73: mod_base = OTHER; note = 2'-O-methyl modified nucleotide
  modified_base 74: mod_base = OTHER; note = 2'-O-methyl modified nucleotide
  modified_base 75: mod_base = OTHER; note = 2'-O-methyl modified nucleotide
  modified_base 76: mod_base = OTHER; note = 2'-O-methyl modified nucleotide
  modified_base 77: mod_base = OTHER; note = 2'-O-methyl modified nucleotide
  modified_base 78: mod_base = OTHER; note = 2'-O-methyl modified nucleotide
  modified_base 79: mod_base = OTHER; note = 2'-O-methyl modified nucleotide
  modified_base 80: mod_base = OTHER; note = 2'-O-methyl modified nucleotide
  modified_base 81: mod_base = OTHER; note = 2'-O-methyl modified nucleotide
  modified_base 82: mod_base = OTHER; note = 2'-O-methyl modified nucleotide
  modified_base 83: mod_base = OTHER; note = 2'-O-methyl modified nucleotide
  modified_base 84: mod_base = OTHER; note = 2'-O-methyl modified nucleotide
  modified_base 85: mod_base = OTHER; note = 2'-O-methyl modified nucleotide
  modified_base 86: mod_base = OTHER; note = 2'-O-methyl modified nucleotide
  modified_base 87: mod_base = OTHER; note = 2'-O-methyl modified nucleotide
  modified_base 88: mod_base = OTHER; note = 2'-O-methyl modified nucleotide
  modified_base 89: mod_base = OTHER; note = 2'-O-methyl modified nucleotide
  modified_base 90: mod_base = OTHER; note = 2'-O-methyl modified nucleotide
  modified_base 91: mod_base = OTHER; note = 2'-O-methyl modified nucleotide
  modified_base 92: mod_base = OTHER; note = 2'-O-methyl modified nucleotide
  modified_base 93: mod_base = OTHER; note = 2'-O-methyl modified nucleotide
  modified_base 94: mod_base = OTHER; note = 2'-O-methyl modified nucleotide
  modified_base 95: mod_base = OTHER; note = 2'-O-methyl modified nucleotide
  modified_base 96: mod_base = OTHER; note = 2'-O-methyl modified nucleotide
  modified_base 97: mod_base = OTHER; note = 2'-O-methyl modified nucleotide with phosphorothioate linkage
  modified_base 98: mod_base = OTHER; note = 2'-O-methyl modified nucleotide with phosphorothioate linkage
  modified_base 99: mod_base = OTHER; note = 2'-O-methyl modified nucleotide with phosphorothioate linkage
  modified_base 100: mod_base = OTHER; note = 2'-O-methyl modified nucleotide
  misc_difference 97..100: note = This region may encompass 0-4 nucleotides

SEQ ID NO: 2415 - RNA, 100 nt, synthetic construct; identical to SEQ ID NO: 1415
  source 1..100: mol_type = other RNA
  modified_base 1: mod_base = OTHER; note = 2'-O-methyl modified nucleotide with phosphorothioate linkage
  modified_base 2: mod_base = OTHER; note = 2'-O-methyl modified nucleotide with phosphorothioate linkage
  modified_base 3: mod_base = OTHER; note = 2'-O-methyl modified nucleotide with phosphorothioate linkage
  modified_base 29: mod_base = OTHER; note = 2'-O-methyl modified nucleotide
  modified_base 30: mod_base = OTHER; note = 2'-O-methyl modified nucleotide
  modified_base 31: mod_base = OTHER; note = 2'-O-methyl modified nucleotide
  modified_base 32: mod_base = OTHER; note = 2'-O-methyl modified nucleotide
  modified_base 33: mod_base = OTHER; note = 2'-O-methyl modified nucleotide
  modified_base 34: mod_base = OTHER; note = 2'-O-methyl modified nucleotide
  modified_base 35: mod_base = OTHER; note = 2'-O-methyl modified nucleotide
  modified_base 36: mod_base = OTHER; note = 2'-O-methyl modified nucleotide
  modified_base 37: mod_base = OTHER; note = 2'-O-methyl modified nucleotide
  modified_base 38: mod_base = OTHER; note = 2'-O-methyl modified nucleotide
  modified_base 39: mod_base = OTHER; note = 2'-O-methyl modified nucleotide
  modified_base 40: mod_base = OTHER; note = 2'-O-methyl modified nucleotide
  modified_base 69: mod_base = OTHER; note = 2'-O-methyl modified nucleotide
  modified_base 70: mod_base = OTHER; note = 2'-O-methyl modified nucleotide
  modified_base 71: mod_base = OTHER; note = 2'-O-methyl modified nucleotide
  modified_base 72: mod_base = OTHER; note = 2'-O-methyl modified nucleotide
  modified_base 73: mod_base = OTHER; note = 2'-O-methyl modified nucleotide
  modified_base 74: mod_base = OTHER; note = 2'-O-methyl modified nucleotide
  modified_base 75: mod_base = OTHER; note = 2'-O-methyl modified nucleotide
  modified_base 76: mod_base = OTHER; note = 2'-O-methyl modified nucleotide
  modified_base 77: mod_base = OTHER; note = 2'-O-methyl modified nucleotide
  modified_base 78: mod_base = OTHER; note = 2'-O-methyl modified nucleotide
  modified_base 79: mod_base = OTHER; note = 2'-O-methyl modified nucleotide
  modified_base 80: mod_base = OTHER; note = 2'-O-methyl modified nucleotide
  modified_base 81: mod_base = OTHER; note = 2'-O-methyl modified nucleotide
  modified_base 82: mod_base = OTHER; note = 2'-O-methyl modified nucleotide
  modified_base 83: mod_base = OTHER; note = 2'-O-methyl modified nucleotide
  modified_base 84: mod_base = OTHER; note = 2'-O-methyl modified nucleotide
  modified_base 85: mod_base = OTHER; note = 2'-O-methyl modified nucleotide
  modified_base 86: mod_base = OTHER; note = 2'-O-methyl modified nucleotide
  modified_base 87: mod_base = OTHER; note = 2'-O-methyl modified nucleotide
  modified_base 88: mod_base = OTHER; note = 2'-O-methyl modified nucleotide
  modified_base 89: mod_base = OTHER; note = 2'-O-methyl modified nucleotide
  modified_base 90: mod_base = OTHER; note = 2'-O-methyl modified nucleotide
  modified_base 91: mod_base = OTHER; note = 2'-O-methyl modified nucleotide
  modified_base 92: mod_base = OTHER; note = 2'-O-methyl modified nucleotide
  modified_base 93: mod_base = OTHER; note = 2'-O-methyl modified nucleotide
  modified_base 94: mod_base = OTHER; note = 2'-O-methyl modified nucleotide
  modified_base 95: mod_base = OTHER; note = 2'-O-methyl modified nucleotide
  modified_base 96: mod_base = OTHER; note = 2'-O-methyl modified nucleotide
  modified_base 97: mod_base = OTHER; note = 2'-O-methyl modified nucleotide with phosphorothioate linkage
  modified_base 98: mod_base = OTHER; note = 2'-O-methyl modified nucleotide with phosphorothioate linkage
  modified_base 99: mod_base = OTHER; note = 2'-O-methyl modified nucleotide with phosphorothioate linkage
  modified_base 100: mod_base = OTHER; note = 2'-O-methyl modified nucleotide
  misc_difference 97..100: note = This region may encompass 0-4 nucleotides

SEQ ID NO: 2416 - RNA, 100 nt, synthetic construct; identical to SEQ ID NO: 1416
  source 1..100: mol_type = other RNA
  modified_base 1: mod_base = OTHER; note = 2'-O-methyl modified nucleotide with phosphorothioate linkage
  modified_base 2: mod_base = OTHER; note = 2'-O-methyl modified nucleotide with phosphorothioate linkage
  modified_base 3: mod_base = OTHER; note = 2'-O-methyl modified nucleotide with phosphorothioate linkage
  modified_base 29: mod_base = OTHER; note = 2'-O-methyl modified nucleotide
  modified_base 30: mod_base = OTHER; note = 2'-O-methyl modified nucleotide
  modified_base 31: mod_base = OTHER; note = 2'-O-methyl modified nucleotide
  modified_base 32: mod_base = OTHER; note = 2'-O-methyl modified nucleotide
  modified_base 33: mod_base = OTHER; note = 2'-O-methyl modified nucleotide
  modified_base 34: mod_base = OTHER; note = 2'-O-methyl modified nucleotide
  modified_base 35: mod_base = OTHER; note = 2'-O-methyl modified nucleotide
  modified_base 36: mod_base = OTHER; note = 2'-O-methyl modified nucleotide
  modified_base 37: mod_base = OTHER; note = 2'-O-methyl modified nucleotide
  modified_base 38: mod_base = OTHER; note = 2'-O-methyl modified nucleotide
  modified_base 39: mod_base = OTHER; note = 2'-O-methyl modified nucleotide
  modified_base 40: mod_base = OTHER; note = 2'-O-methyl modified nucleotide
  modified_base 69: mod_base = OTHER; note = 2'-O-methyl modified nucleotide
  modified_base 70: mod_base = OTHER; note = 2'-O-methyl modified nucleotide
  modified_base 71: mod_base = OTHER; note = 2'-O-methyl modified nucleotide
  modified_base 72: mod_base = OTHER; note = 2'-O-methyl modified nucleotide
  modified_base 73: mod_base = OTHER; note = 2'-O-methyl modified nucleotide
  modified_base 74: mod_base = OTHER; note = 2'-O-methyl modified nucleotide
  modified_base 75: mod_base = OTHER; note = 2'-O-methyl modified nucleotide
  modified_base 76: mod_base = OTHER; note = 2'-O-methyl modified nucleotide
  modified_base 77: mod_base = OTHER; note = 2'-O-methyl modified nucleotide
  modified_base 78: mod_base = OTHER; note = 2'-O-methyl modified nucleotide
  modified_base 79: mod_base = OTHER; note = 2'-O-methyl modified nucleotide
  modified_base 80: mod_base = OTHER; note = 2'-O-methyl modified nucleotide
  modified_base 81: mod_base = OTHER; note = 2'-O-methyl modified nucleotide
  modified_base 82: mod_base = OTHER; note = 2'-O-methyl modified nucleotide
  modified_base 83: mod_base = OTHER; note = 2'-O-methyl modified nucleotide
  modified_base 84: mod_base = OTHER; note = 2'-O-methyl modified nucleotide
  modified_base 85: mod_base = OTHER; note = 2'-O-methyl modified nucleotide
  modified_base 86: mod_base = OTHER; note = 2'-O-methyl modified nucleotide
  modified_base 87: mod_base = OTHER; note = 2'-O-methyl modified nucleotide
  modified_base 88: mod_base = OTHER; note = 2'-O-methyl modified nucleotide
  modified_base 89: mod_base = OTHER; note = 2'-O-methyl modified nucleotide
  modified_base 90: mod_base = OTHER; note = 2'-O-methyl modified nucleotide
  modified_base 91: mod_base = OTHER; note = 2'-O-methyl modified nucleotide
  modified_base 92: mod_base = OTHER; note = 2'-O-methyl modified nucleotide
  modified_base 93: mod_base = OTHER; note = 2'-O-methyl modified nucleotide
  modified_base 94: mod_base = OTHER; note = 2'-O-methyl modified nucleotide
  modified_base 95: mod_base = OTHER; note = 2'-O-methyl modified nucleotide
  modified_base 96: mod_base = OTHER; note = 2'-O-methyl modified nucleotide
  modified_base 97: mod_base = OTHER; note = 2'-O-methyl modified nucleotide with phosphorothioate linkage
  modified_base 98: mod_base = OTHER; note = 2'-O-methyl modified nucleotide with phosphorothioate linkage
  modified_base 99: mod_base = OTHER; note = 2'-O-methyl modified nucleotide with phosphorothioate linkage
  modified_base 100: mod_base = OTHER; note = 2'-O-methyl modified nucleotide
  misc_difference 97..100: note = This region may encompass 0-4 nucleotides

SEQ ID NO: 2417 - RNA, 100 nt, synthetic construct; identical to SEQ ID NO: 1417
  source 1..100: mol_type = other RNA
  modified_base 1: mod_base = OTHER; note = 2'-O-methyl modified nucleotide with phosphorothioate linkage
  modified_base 2: mod_base = OTHER; note = 2'-O-methyl modified nucleotide with phosphorothioate linkage
  modified_base 3: mod_base = OTHER; note = 2'-O-methyl modified nucleotide with phosphorothioate linkage
  modified_base 29: mod_base = OTHER; note = 2'-O-methyl modified nucleotide
  modified_base 30: mod_base = OTHER; note = 2'-O-methyl modified nucleotide
  modified_base 31: mod_base = OTHER; note = 2'-O-methyl modified nucleotide
  modified_base 32: mod_base = OTHER; note = 2'-O-methyl modified nucleotide
  modified_base 33: mod_base = OTHER; note = 2'-O-methyl modified nucleotide
  modified_base 34: mod_base = OTHER; note = 2'-O-methyl modified nucleotide
  modified_base 35: mod_base = OTHER; note = 2'-O-methyl modified nucleotide
  modified_base 36: mod_base = OTHER; note = 2'-O-methyl modified nucleotide
  modified_base 37: mod_base = OTHER; note = 2'-O-methyl modified nucleotide
  modified_base 38: mod_base = OTHER; note = 2'-O-methyl modified nucleotide
  modified_base 39: mod_base = OTHER; note = 2'-O-methyl modified nucleotide
  modified_base 40: mod_base = OTHER; note = 2'-O-methyl modified nucleotide
  modified_base 69: mod_base = OTHER; note = 2'-O-methyl modified nucleotide
  modified_base 70: mod_base = OTHER; note = 2'-O-methyl modified nucleotide
  modified_base 71: mod_base = OTHER; note = 2'-O-methyl modified nucleotide
  modified_base 72: mod_base = OTHER; note = 2'-O-methyl modified nucleotide
  modified_base 73: mod_base = OTHER; note = 2'-O-methyl modified nucleotide
  modified_base 74: mod_base = OTHER; note = 2'-O-methyl modified nucleotide
  modified_base 75: mod_base = OTHER; note = 2'-O-methyl modified nucleotide
  modified_base 76: mod_base = OTHER; note = 2'-O-methyl modified nucleotide
  modified_base 77: mod_base = OTHER; note = 2'-O-methyl modified nucleotide
  modified_base 78: mod_base = OTHER; note = 2'-O-methyl modified nucleotide
  modified_base 79: mod_base = OTHER; note = 2'-O-methyl modified nucleotide
  modified_base 80: mod_base = OTHER; note = 2'-O-methyl modified nucleotide
  modified_base 81: mod_base = OTHER; note = 2'-O-methyl modified nucleotide
  modified_base 82: mod_base = OTHER; note = 2'-O-methyl modified nucleotide
  modified_base 83: mod_base = OTHER; note = 2'-O-methyl modified nucleotide
  modified_base 84: mod_base = OTHER; note = 2'-O-methyl modified nucleotide
  modified_base 85: mod_base = OTHER; note = 2'-O-methyl modified nucleotide
  modified_base 86: mod_base = OTHER; note = 2'-O-methyl modified nucleotide
  modified_base 87: mod_base = OTHER; note = 2'-O-methyl modified nucleotide
  modified_base 88: mod_base = OTHER; note = 2'-O-methyl modified nucleotide
  modified_base 89: mod_base = OTHER; note = 2'-O-methyl modified nucleotide
  modified_base 90: mod_base = OTHER; note = 2'-O-methyl modified nucleotide
  modified_base 91: mod_base = OTHER; note = 2'-O-methyl modified nucleotide
  modified_base 92: mod_base = OTHER; note = 2'-O-methyl modified nucleotide
  modified_base 93: mod_base = OTHER; note = 2'-O-methyl modified nucleotide
  modified_base 94: mod_base = OTHER; note = 2'-O-methyl modified nucleotide
  modified_base 95: mod_base = OTHER; note = 2'-O-methyl modified nucleotide
  modified_base 96: mod_base = OTHER; note = 2'-O-methyl modified nucleotide
  modified_base 97: mod_base = OTHER; note = 2'-O-methyl modified nucleotide with phosphorothioate linkage
  modified_base 98: mod_base = OTHER; note = 2'-O-methyl modified nucleotide with phosphorothioate linkage
  modified_base 99: mod_base = OTHER; note = 2'-O-methyl modified nucleotide with phosphorothioate linkage
  modified_base 100: mod_base = OTHER; note = 2'-O-methyl modified nucleotide
  misc_difference 97..100: note = This region may encompass 0-4 nucleotides

SEQ ID NO: 2418 - RNA, 100 nt, synthetic construct; identical to SEQ ID NO: 1418
  source 1..100: mol_type = other RNA
  modified_base 1: mod_base = OTHER; note = 2'-O-methyl modified nucleotide with phosphorothioate linkage
  modified_base 2: mod_base = OTHER; note = 2'-O-methyl modified nucleotide with phosphorothioate linkage
  modified_base 3: mod_base = OTHER; note = 2'-O-methyl modified nucleotide with phosphorothioate linkage
  modified_base 29: mod_base = OTHER; note = 2'-O-methyl modified nucleotide
  modified_base 30: mod_base = OTHER; note = 2'-O-methyl modified nucleotide
  modified_base 31: mod_base = OTHER; note = 2'-O-methyl modified nucleotide
  modified_base 32: mod_base = OTHER; note = 2'-O-methyl modified nucleotide
  modified_base 33: mod_base = OTHER; note = 2'-O-methyl modified nucleotide
  modified_base 34: mod_base = OTHER; note = 2'-O-methyl modified nucleotide
  modified_base 35: mod_base = OTHER; note = 2'-O-methyl modified nucleotide
  modified_base 36: mod_base = OTHER; note = 2'-O-methyl modified nucleotide
  modified_base 37: mod_base = OTHER; note = 2'-O-methyl modified nucleotide
  modified_base 38: mod_base = OTHER; note = 2'-O-methyl modified nucleotide
  modified_base 39: mod_base = OTHER; note = 2'-O-methyl modified nucleotide
  modified_base 40: mod_base = OTHER; note = 2'-O-methyl modified nucleotide
  modified_base 69: mod_base = OTHER; note = 2'-O-methyl modified nucleotide
  modified_base 70: mod_base = OTHER; note = 2'-O-methyl modified nucleotide
  modified_base 71: mod_base = OTHER; note = 2'-O-methyl modified nucleotide
  modified_base 72: mod_base = OTHER; note = 2'-O-methyl modified nucleotide
  modified_base 73: mod_base = OTHER; note = 2'-O-methyl modified nucleotide
  modified_base 74: mod_base = OTHER; note = 2'-O-methyl modified nucleotide
  modified_base 75: mod_base = OTHER; note = 2'-O-methyl modified nucleotide
  modified_base 76: mod_base = OTHER; note = 2'-O-methyl modified nucleotide
  modified_base 77: mod_base = OTHER; note = 2'-O-methyl modified nucleotide
  modified_base 78: mod_base = OTHER; note = 2'-O-methyl modified nucleotide
  modified_base 79: mod_base = OTHER; note = 2'-O-methyl modified nucleotide
  modified_base 80: mod_base = OTHER; note = 2'-O-methyl modified nucleotide
  modified_base 81: mod_base = OTHER; note = 2'-O-methyl modified nucleotide
  modified_base 82: mod_base = OTHER; note = 2'-O-methyl modified nucleotide
  modified_base 83: mod_base = OTHER; note = 2'-O-methyl modified nucleotide
  modified_base 84: mod_base = OTHER; note = 2'-O-methyl modified nucleotide
  modified_base 85: mod_base = OTHER; note = 2'-O-methyl modified nucleotide
  modified_base 86: mod_base = OTHER; note = 2'-O-methyl modified nucleotide
  modified_base 87: mod_base = OTHER; note = 2'-O-methyl modified nucleotide
  modified_base 88: mod_base = OTHER; note = 2'-O-methyl modified nucleotide
  modified_base 89: mod_base = OTHER; note = 2'-O-methyl modified nucleotide
  modified_base 90: mod_base = OTHER; note = 2'-O-methyl modified nucleotide
  modified_base 91: mod_base = OTHER; note = 2'-O-methyl modified nucleotide
  modified_base 92: mod_base = OTHER; note = 2'-O-methyl modified nucleotide
  modified_base 93: mod_base = OTHER; note = 2'-O-methyl modified nucleotide
  modified_base 94: mod_base = OTHER; note = 2'-O-methyl modified nucleotide
  modified_base 95: mod_base = OTHER; note = 2'-O-methyl modified nucleotide
  modified_base 96: mod_base = OTHER; note = 2'-O-methyl modified nucleotide
  modified_base 97: mod_base = OTHER; note = 2'-O-methyl modified nucleotide with phosphorothioate linkage
  modified_base 98: mod_base = OTHER; note = 2'-O-methyl modified nucleotide with phosphorothioate linkage
  modified_base 99: mod_base = OTHER; note = 2'-O-methyl modified nucleotide with phosphorothioate linkage
  modified_base 100: mod_base = OTHER; note = 2'-O-methyl modified nucleotide
  misc_difference 97..100: note = This region may encompass 0-4 nucleotides

SEQ ID NO: 2419 - RNA, 100 nt, synthetic construct; identical to SEQ ID NO: 1419
  source 1..100: mol_type = other RNA
  modified_base 1: mod_base = OTHER; note = 2'-O-methyl modified nucleotide with phosphorothioate linkage
  modified_base 2: mod_base = OTHER; note = 2'-O-methyl modified nucleotide with phosphorothioate linkage
  modified_base 3: mod_base = OTHER; note = 2'-O-methyl modified nucleotide with phosphorothioate linkage
  modified_base 29: mod_base = OTHER; note = 2'-O-methyl modified nucleotide
  modified_base 30: mod_base = OTHER; note = 2'-O-methyl modified nucleotide
  modified_base 31: mod_base = OTHER; note = 2'-O-methyl modified nucleotide
  modified_base 32: mod_base = OTHER; note = 2'-O-methyl modified nucleotide
  modified_base 33: mod_base = OTHER; note = 2'-O-methyl modified nucleotide
  modified_base 34: mod_base = OTHER; note = 2'-O-methyl modified nucleotide
  modified_base 35: mod_base = OTHER; note = 2'-O-methyl modified nucleotide
  modified_base 36: mod_base = OTHER; note = 2'-O-methyl modified nucleotide
  modified_base 37: mod_base = OTHER; note = 2'-O-methyl modified nucleotide
  modified_base 38: mod_base = OTHER; note = 2'-O-methyl modified nucleotide
  modified_base 39: mod_base = OTHER; note = 2'-O-methyl modified nucleotide
  modified_base 40: mod_base = OTHER; note = 2'-O-methyl modified nucleotide
  modified_base 69: mod_base = OTHER; note = 2'-O-methyl modified nucleotide
  modified_base 70: mod_base = OTHER; note = 2'-O-methyl modified nucleotide
  modified_base 71: mod_base = OTHER; note = 2'-O-methyl modified nucleotide
  modified_base 72: mod_base = OTHER; note = 2'-O-methyl modified nucleotide
  modified_base 73: mod_base = OTHER; note = 2'-O-methyl modified nucleotide
  modified_base 74: mod_base = OTHER; note = 2'-O-methyl modified nucleotide
  modified_base 75: mod_base = OTHER; note = 2'-O-methyl modified nucleotide
  modified_base 76: mod_base = OTHER; note = 2'-O-methyl modified nucleotide
  modified_base 77: mod_base = OTHER; note = 2'-O-methyl modified nucleotide
  modified_base 78: mod_base = OTHER; note = 2'-O-methyl modified nucleotide
  modified_base 79: mod_base = OTHER; note = 2'-O-methyl modified nucleotide
  modified_base 80: mod_base = OTHER; note = 2'-O-methyl modified nucleotide
  modified_base 81: mod_base = OTHER; note = 2'-O-methyl modified nucleotide
  modified_base 82: mod_base = OTHER; note = 2'-O-methyl modified nucleotide
  modified_base 83: mod_base = OTHER; note = 2'-O-methyl modified nucleotide
  modified_base 84: mod_base = OTHER; note = 2'-O-methyl modified nucleotide
  modified_base 85: mod_base = OTHER; note = 2'-O-methyl modified nucleotide
  modified_base 86: mod_base = OTHER; note = 2'-O-methyl modified nucleotide
  modified_base 87: mod_base = OTHER; note = 2'-O-methyl modified nucleotide
  modified_base 88: mod_base = OTHER; note = 2'-O-methyl modified nucleotide
  modified_base 89: mod_base = OTHER; note = 2'-O-methyl modified nucleotide
  modified_base 90: mod_base = OTHER; note = 2'-O-methyl modified nucleotide
  modified_base 91: mod_base = OTHER; note = 2'-O-methyl modified nucleotide
  modified_base 92: mod_base = OTHER; note = 2'-O-methyl modified nucleotide
  modified_base 93: mod_base = OTHER; note = 2'-O-methyl modified nucleotide
  modified_base 94: mod_base = OTHER; note = 2'-O-methyl modified nucleotide
  modified_base 95: mod_base = OTHER; note = 2'-O-methyl modified nucleotide
  modified_base 96: mod_base = OTHER; note = 2'-O-methyl modified nucleotide
  modified_base 97: mod_base = OTHER; note = 2'-O-methyl modified nucleotide with phosphorothioate linkage
  modified_base 98: mod_base = OTHER; note = 2'-O-methyl modified nucleotide with phosphorothioate linkage
  modified_base 99: mod_base = OTHER; note = 2'-O-methyl modified nucleotide with phosphorothioate linkage
  modified_base 100: mod_base = OTHER; note = 2'-O-methyl modified nucleotide
  misc_difference 97..100: note = This region may encompass 0-4 nucleotides

SEQ ID NO: 2420 - RNA, 100 nt, synthetic construct; identical to SEQ ID NO: 1420
  source 1..100: mol_type = other RNA
  modified_base 1: mod_base = OTHER; note = 2'-O-methyl modified nucleotide with phosphorothioate linkage
  modified_base 2: mod_base = OTHER; note = 2'-O-methyl modified nucleotide with phosphorothioate linkage
  modified_base 3: mod_base = OTHER; note = 2'-O-methyl modified nucleotide with phosphorothioate linkage
  modified_base 29: mod_base = OTHER; note = 2'-O-methyl modified nucleotide
  modified_base 30: mod_base = OTHER; note = 2'-O-methyl modified nucleotide
  modified_base 31: mod_base = OTHER; note = 2'-O-methyl modified nucleotide
  modified_base 32: mod_base = OTHER; note = 2'-O-methyl modified nucleotide
  modified_base 33: mod_base = OTHER; note = 2'-O-methyl modified nucleotide
  modified_base 34: mod_base = OTHER; note = 2'-O-methyl modified nucleotide
  modified_base 35: mod_base = OTHER; note = 2'-O-methyl modified nucleotide
  modified_base 36: mod_base = OTHER; note = 2'-O-methyl modified nucleotide
  modified_base 37: mod_base = OTHER; note = 2'-O-methyl modified nucleotide
  modified_base 38: mod_base = OTHER; note = 2'-O-methyl modified nucleotide
  modified_base 39: mod_base = OTHER; note = 2'-O-methyl modified nucleotide
  modified_base 40: mod_base = OTHER; note = 2'-O-methyl modified nucleotide
  modified_base 69: mod_base = OTHER; note = 2'-O-methyl modified nucleotide
  modified_base 70: mod_base = OTHER; note = 2'-O-methyl modified nucleotide
  modified_base 71: mod_base = OTHER; note = 2'-O-methyl modified nucleotide
  modified_base 72: mod_base = OTHER; note = 2'-O-methyl modified nucleotide
  modified_base 73: mod_base = OTHER; note = 2'-O-methyl modified nucleotide
  modified_base 74: mod_base = OTHER; note = 2'-O-methyl modified nucleotide
  modified_base 75: mod_base = OTHER; note = 2'-O-methyl modified nucleotide
  modified_base 76: mod_base = OTHER; note = 2'-O-methyl modified nucleotide
  modified_base 77: mod_base = OTHER; note = 2'-O-methyl modified nucleotide
  modified_base 78: mod_base = OTHER; note = 2'-O-methyl modified nucleotide
  modified_base 79: mod_base = OTHER; note = 2'-O-methyl modified nucleotide
  modified_base 80: mod_base = OTHER; note = 2'-O-methyl modified nucleotide
  modified_base 81: mod_base = OTHER; note = 2'-O-methyl modified nucleotide
  modified_base 82: mod_base = OTHER; note = 2'-O-methyl modified nucleotide
  modified_base 83: mod_base = OTHER; note = 2'-O-methyl modified nucleotide
  modified_base 84: mod_base = OTHER; note = 2'-O-methyl modified nucleotide
  modified_base 85: mod_base = OTHER; note = 2'-O-methyl modified nucleotide
  modified_base 86: mod_base = OTHER; note = 2'-O-methyl modified nucleotide
  modified_base 87: mod_base = OTHER; note = 2'-O-methyl modified nucleotide
  modified_base 88: mod_base = OTHER; note = 2'-O-methyl modified nucleotide
  modified_base 89: mod_base = OTHER; note = 2'-O-methyl modified nucleotide
  modified_base 90: mod_base = OTHER; note = 2'-O-methyl modified nucleotide
  modified_base 91: mod_base = OTHER; note = 2'-O-methyl modified nucleotide
  modified_base 92: mod_base = OTHER; note = 2'-O-methyl modified nucleotide
  modified_base 93: mod_base = OTHER; note = 2'-O-methyl modified nucleotide
  modified_base 94: mod_base = OTHER; note = 2'-O-methyl modified nucleotide
  modified_base 95: mod_base = OTHER; note = 2'-O-methyl modified nucleotide
  modified_base 96: mod_base = OTHER; note = 2'-O-methyl modified nucleotide
  modified_base 97: mod_base = OTHER; note = 2'-O-methyl modified nucleotide with phosphorothioate linkage
  modified_base 98: mod_base = OTHER; note = 2'-O-methyl modified nucleotide with phosphorothioate linkage
  modified_base 99: mod_base = OTHER; note = 2'-O-methyl modified nucleotide with phosphorothioate linkage
  modified_base 100: mod_base = OTHER; note = 2'-O-methyl modified nucleotide
  misc_difference 97..100: note = This region may encompass 0-4 nucleotides

SEQ ID NO: 2421 - RNA, 100 nt, synthetic construct; identical to SEQ ID NO: 1421
  source 1..100: mol_type = other RNA
  modified_base 1: mod_base = OTHER; note = 2'-O-methyl modified nucleotide with phosphorothioate linkage
  modified_base 2: mod_base = OTHER; note = 2'-O-methyl modified nucleotide with phosphorothioate linkage
  modified_base 3: mod_base = OTHER; note = 2'-O-methyl modified nucleotide with phosphorothioate linkage
  modified_base 29: mod_base = OTHER; note = 2'-O-methyl modified nucleotide
  modified_base 30: mod_base = OTHER; note = 2'-O-methyl modified nucleotide
  modified_base 31: mod_base = OTHER; note = 2'-O-methyl modified nucleotide
  modified_base 32: mod_base = OTHER; note = 2'-O-methyl modified nucleotide
  modified_base 33: mod_base = OTHER; note = 2'-O-methyl modified nucleotide
  modified_base 34: mod_base = OTHER; note = 2'-O-methyl modified nucleotide
  modified_base 35: mod_base = OTHER; note = 2'-O-methyl modified nucleotide
  modified_base 36: mod_base = OTHER; note = 2'-O-methyl modified nucleotide
  modified_base 37: mod_base = OTHER; note = 2'-O-methyl modified nucleotide
  modified_base 38: mod_base = OTHER; note = 2'-O-methyl modified nucleotide
  modified_base 39: mod_base = OTHER; note = 2'-O-methyl modified nucleotide
  modified_base 40: mod_base = OTHER; note = 2'-O-methyl modified nucleotide
  modified_base 69: mod_base = OTHER; note = 2'-O-methyl modified nucleotide
  modified_base 70: mod_base = OTHER; note = 2'-O-methyl modified nucleotide
  modified_base 71: mod_base = OTHER; note = 2'-O-methyl modified nucleotide
  modified_base 72: mod_base = OTHER; note = 2'-O-methyl modified nucleotide
  modified_base 73: mod_base = OTHER; note = 2'-O-methyl modified nucleotide
  modified_base 74: mod_base = OTHER; note = 2'-O-methyl modified nucleotide
  modified_base 75: mod_base = OTHER; note = 2'-O-methyl modified nucleotide
  modified_base 76: mod_base = OTHER; note = 2'-O-methyl modified nucleotide
  modified_base 77: mod_base = OTHER; note = 2'-O-methyl modified nucleotide
  modified_base 78: mod_base = OTHER; note = 2'-O-methyl modified nucleotide
  modified_base 79: mod_base = OTHER; note = 2'-O-methyl modified nucleotide
  modified_base 80: mod_base = OTHER; note = 2'-O-methyl modified nucleotide
  modified_base 81: mod_base = OTHER; note = 2'-O-methyl modified nucleotide
  modified_base 82: mod_base = OTHER; note = 2'-O-methyl modified nucleotide
  modified_base 83: mod_base = OTHER; note = 2'-O-methyl modified nucleotide
  modified_base 84: mod_base = OTHER; note = 2'-O-methyl modified nucleotide
  modified_base 85: mod_base = OTHER; note = 2'-O-methyl modified nucleotide
  modified_base 86: mod_base = OTHER; note = 2'-O-methyl modified nucleotide
  modified_base 87: mod_base = OTHER; note = 2'-O-methyl modified nucleotide
  modified_base 88: mod_base = OTHER; note = 2'-O-methyl modified nucleotide
  modified_base 89: mod_base = OTHER; note = 2'-O-methyl modified nucleotide
  modified_base 90: mod_base = OTHER; note = 2'-O-methyl modified nucleotide
  modified_base 91: mod_base = OTHER; note = 2'-O-methyl modified nucleotide
  modified_base 92: mod_base = OTHER; note = 2'-O-methyl modified nucleotide
  modified_base 93: mod_base = OTHER; note = 2'-O-methyl modified nucleotide
  modified_base 94: mod_base = OTHER; note = 2'-O-methyl modified nucleotide
  modified_base 95: mod_base = OTHER; note = 2'-O-methyl modified nucleotide
  modified_base 96: mod_base = OTHER; note = 2'-O-methyl modified nucleotide
  modified_base 97: mod_base = OTHER; note = 2'-O-methyl modified nucleotide with phosphorothioate linkage
  modified_base 98: mod_base = OTHER; note = 2'-O-methyl modified nucleotide with phosphorothioate linkage
  modified_base 99: mod_base = OTHER; note = 2'-O-methyl modified nucleotide with phosphorothioate linkage
  modified_base 100: mod_base = OTHER; note = 2'-O-methyl modified nucleotide
  misc_difference 97..100: note = This region may encompass 0-4 nucleotides

SEQ ID NO: 2422 - RNA, 100 nt, synthetic construct; identical to SEQ ID NO: 1422
  source 1..100: mol_type = other RNA
  modified_base 1: mod_base = OTHER; note = 2'-O-methyl modified nucleotide with phosphorothioate linkage
  modified_base 2: mod_base = OTHER; note = 2'-O-methyl modified nucleotide with phosphorothioate linkage
  modified_base 3: mod_base = OTHER; note = 2'-O-methyl modified nucleotide with phosphorothioate linkage
  modified_base 29: mod_base = OTHER; note = 2'-O-methyl modified nucleotide
  modified_base 30: mod_base = OTHER; note = 2'-O-methyl modified nucleotide
  modified_base 31: mod_base = OTHER; note = 2'-O-methyl modified nucleotide
  modified_base 32: mod_base = OTHER; note = 2'-O-methyl modified nucleotide
  modified_base 33: mod_base = OTHER; note = 2'-O-methyl modified nucleotide
  modified_base 34: mod_base = OTHER; note = 2'-O-methyl modified nucleotide
  modified_base 35: mod_base = OTHER; note = 2'-O-methyl modified nucleotide
  modified_base 36: mod_base = OTHER; note = 2'-O-methyl modified nucleotide
  modified_base 37: mod_base = OTHER; note = 2'-O-methyl modified nucleotide
  modified_base 38: mod_base = OTHER; note = 2'-O-methyl modified nucleotide
  modified_base 39: mod_base = OTHER; note = 2'-O-methyl modified nucleotide
  modified_base 40: mod_base = OTHER; note = 2'-O-methyl modified nucleotide
  modified_base 69: mod_base = OTHER; note = 2'-O-methyl modified nucleotide
  modified_base 70: mod_base = OTHER; note = 2'-O-methyl modified nucleotide
  modified_base 71: mod_base = OTHER; note = 2'-O-methyl modified nucleotide
  modified_base 72: mod_base = OTHER; note = 2'-O-methyl modified nucleotide
  modified_base 73: mod_base = OTHER; note = 2'-O-methyl modified nucleotide
  modified_base 74: mod_base = OTHER; note = 2'-O-methyl modified nucleotide
  modified_base 75: mod_base = OTHER; note = 2'-O-methyl modified nucleotide
  modified_base 76: mod_base = OTHER; note = 2'-O-methyl modified nucleotide
  modified_base 77: mod_base = OTHER; note = 2'-O-methyl modified nucleotide
  modified_base 78: mod_base = OTHER; note = 2'-O-methyl modified nucleotide
  modified_base 79: mod_base = OTHER; note = 2'-O-methyl modified nucleotide
  modified_base 80: mod_base = OTHER; note = 2'-O-methyl modified nucleotide
  modified_base 81: mod_base = OTHER; note = 2'-O-methyl modified nucleotide
  modified_base 82: mod_base = OTHER; note = 2'-O-methyl modified nucleotide
  modified_base 83: mod_base = OTHER; note = 2'-O-methyl modified nucleotide
  modified_base 84: mod_base = OTHER; note = 2'-O-methyl modified nucleotide
  modified_base 85: mod_base = OTHER; note = 2'-O-methyl modified nucleotide
  modified_base 86: mod_base = OTHER; note = 2'-O-methyl modified nucleotide
  modified_base 87: mod_base = OTHER; note = 2'-O-methyl modified nucleotide
  modified_base 88: mod_base = OTHER; note = 2'-O-methyl modified nucleotide
  modified_base 89: mod_base = OTHER; note = 2'-O-methyl modified nucleotide
  modified_base 90: mod_base = OTHER; note = 2'-O-methyl modified nucleotide
  modified_base 91: mod_base = OTHER; note = 2'-O-methyl modified nucleotide
  modified_base 92: mod_base = OTHER; note = 2'-O-methyl modified nucleotide
  modified_base 93: mod_base = OTHER; note = 2'-O-methyl modified nucleotide
  modified_base 94: mod_base = OTHER; note = 2'-O-methyl modified nucleotide
  modified_base 95: mod_base = OTHER; note = 2'-O-methyl modified nucleotide
  modified_base 96: mod_base = OTHER; note = 2'-O-methyl modified nucleotide
  modified_base 97: mod_base = OTHER; note = 2'-O-methyl modified nucleotide with phosphorothioate linkage
  modified_base 98: mod_base = OTHER; note = 2'-O-methyl modified nucleotide with phosphorothioate linkage
  modified_base 99: mod_base = OTHER; note = 2'-O-methyl modified nucleotide with phosphorothioate linkage
  modified_base 100: mod_base = OTHER; note = 2'-O-methyl modified nucleotide
  misc_difference 97..100: note = This region may encompass 0-4 nucleotides

SEQ ID NO: 2423 - RNA, 100 nt, synthetic construct; identical to SEQ ID NO: 1423
  source 1..100: mol_type = other RNA
  modified_base 1: mod_base = OTHER; note = 2'-O-methyl modified nucleotide with phosphorothioate linkage
  modified_base 2: mod_base = OTHER; note = 2'-O-methyl modified nucleotide with phosphorothioate linkage
  modified_base 3: mod_base = OTHER; note = 2'-O-methyl modified nucleotide with phosphorothioate linkage
  modified_base 29: mod_base = OTHER; note = 2'-O-methyl modified nucleotide
  modified_base 30: mod_base = OTHER; note = 2'-O-methyl modified nucleotide
  modified_base 31: mod_base = OTHER; note = 2'-O-methyl modified nucleotide
  modified_base 32: mod_base = OTHER; note = 2'-O-methyl modified nucleotide
  modified_base 33: mod_base = OTHER; note = 2'-O-methyl modified nucleotide
  modified_base 34: mod_base = OTHER; note = 2'-O-methyl modified nucleotide
  modified_base 35: mod_base = OTHER; note = 2'-O-methyl modified nucleotide
  modified_base 36: mod_base = OTHER; note = 2'-O-methyl modified nucleotide
  modified_base 37: mod_base = OTHER; note = 2'-O-methyl modified nucleotide
  modified_base 38: mod_base = OTHER; note = 2'-O-methyl modified nucleotide
  modified_base 39: mod_base = OTHER; note = 2'-O-methyl modified nucleotide
  modified_base 40: mod_base = OTHER; note = 2'-O-methyl modified nucleotide
  modified_base 69: mod_base = OTHER; note = 2'-O-methyl modified nucleotide
  modified_base 70: mod_base = OTHER; note = 2'-O-methyl modified nucleotide
  modified_base 71: mod_base = OTHER; note = 2'-O-methyl modified nucleotide
  modified_base 72: mod_base = OTHER; note = 2'-O-methyl modified nucleotide
  modified_base 73: mod_base = OTHER; note = 2'-O-methyl modified nucleotide
  modified_base 74: mod_base = OTHER; note = 2'-O-methyl modified nucleotide
  modified_base 75: mod_base = OTHER; note = 2'-O-methyl modified nucleotide
  modified_base 76: mod_base = OTHER; note = 2'-O-methyl modified nucleotide
  modified_base 77: mod_base = OTHER; note = 2'-O-methyl modified nucleotide
  modified_base 78: mod_base = OTHER; note = 2'-O-methyl modified nucleotide
  modified_base 79: mod_base = OTHER; note = 2'-O-methyl modified nucleotide
  modified_base 80: mod_base = OTHER; note = 2'-O-methyl modified nucleotide
  modified_base 81: mod_base = OTHER; note = 2'-O-methyl modified nucleotide
  modified_base 82: mod_base = OTHER; note = 2'-O-methyl modified nucleotide
  modified_base 83: mod_base = OTHER; note = 2'-O-methyl modified nucleotide
  modified_base 84: mod_base = OTHER; note = 2'-O-methyl modified nucleotide
  modified_base 85: mod_base = OTHER; note = 2'-O-methyl modified nucleotide
  modified_base 86: mod_base = OTHER; note = 2'-O-methyl modified nucleotide
  modified_base 87: mod_base = OTHER; note = 2'-O-methyl modified nucleotide
  modified_base 88: mod_base = OTHER; note = 2'-O-methyl modified nucleotide
  modified_base 89: mod_base = OTHER; note = 2'-O-methyl modified nucleotide
  modified_base 90: mod_base = OTHER; note = 2'-O-methyl modified nucleotide
  modified_base 91: mod_base = OTHER; note = 2'-O-methyl modified nucleotide
  modified_base 92: mod_base = OTHER; note = 2'-O-methyl modified nucleotide
  modified_base 93: mod_base = OTHER; note = 2'-O-methyl modified nucleotide
  modified_base 94: mod_base = OTHER; note = 2'-O-methyl modified nucleotide
  modified_base 95: mod_base = OTHER; note = 2'-O-methyl modified nucleotide
  modified_base 96: mod_base = OTHER; note = 2'-O-methyl modified nucleotide
  modified_base 97: mod_base = OTHER; note = 2'-O-methyl modified nucleotide with phosphorothioate linkage
  modified_base 98: mod_base = OTHER; note = 2'-O-methyl modified nucleotide with phosphorothioate linkage
  modified_base 99: mod_base = OTHER; note = 2'-O-methyl modified nucleotide with phosphorothioate linkage
  modified_base 100: mod_base = OTHER; note = 2'-O-methyl modified nucleotide
  misc_difference 97..100: note = This region may encompass 0-4 nucleotides

SEQ ID NO: 2424 - RNA, 100 nt, synthetic construct; identical to SEQ ID NO: 1424
  source 1..100: mol_type = other RNA
  modified_base 1: mod_base = OTHER; note = 2'-O-methyl modified nucleotide with phosphorothioate linkage
  modified_base 2: mod_base = OTHER; note = 2'-O-methyl modified nucleotide with phosphorothioate linkage
  modified_base 3: mod_base = OTHER; note = 2'-O-methyl modified nucleotide with phosphorothioate linkage
  modified_base 29: mod_base = OTHER; note = 2'-O-methyl modified nucleotide
  modified_base 30: mod_base = OTHER; note = 2'-O-methyl modified nucleotide
  modified_base 31: mod_base = OTHER; note = 2'-O-methyl modified nucleotide
  modified_base 32: mod_base = OTHER; note = 2'-O-methyl modified nucleotide
  modified_base 33: mod_base = OTHER; note = 2'-O-methyl modified nucleotide
  modified_base 34: mod_base = OTHER; note = 2'-O-methyl modified nucleotide
  modified_base 35: mod_base = OTHER; note = 2'-O-methyl modified nucleotide
  modified_base 36: mod_base = OTHER; note = 2'-O-methyl modified nucleotide
  modified_base 37: mod_base = OTHER; note = 2'-O-methyl modified nucleotide
  modified_base 38: mod_base = OTHER; note = 2'-O-methyl modified nucleotide
  modified_base 39: mod_base = OTHER; note = 2'-O-methyl modified nucleotide
  modified_base 40: mod_base = OTHER; note = 2'-O-methyl modified nucleotide
  modified_base 69: mod_base = OTHER; note = 2'-O-methyl modified nucleotide
  modified_base 70: mod_base = OTHER; note = 2'-O-methyl modified nucleotide
  modified_base 71: mod_base = OTHER; note = 2'-O-methyl modified nucleotide
  modified_base 72: mod_base = OTHER; note = 2'-O-methyl modified nucleotide
  modified_base 73: mod_base = OTHER; note = 2'-O-methyl modified nucleotide
  modified_base 74: mod_base = OTHER; note = 2'-O-methyl modified nucleotide
  modified_base 75: mod_base = OTHER; note = 2'-O-methyl modified nucleotide
  modified_base 76: mod_base = OTHER; note = 2'-O-methyl modified nucleotide
  modified_base 77: mod_base = OTHER; note = 2'-O-methyl modified nucleotide
  modified_base 78: mod_base = OTHER; note = 2'-O-methyl modified nucleotide
  modified_base 79: mod_base = OTHER; note = 2'-O-methyl modified nucleotide
  modified_base 80: mod_base = OTHER; note = 2'-O-methyl modified nucleotide
  modified_base 81: mod_base = OTHER; note = 2'-O-methyl modified nucleotide
  modified_base 82: mod_base = OTHER; note = 2'-O-methyl modified nucleotide
  modified_base 83: mod_base = OTHER; note = 2'-O-methyl modified nucleotide
  modified_base 84: mod_base = OTHER; note = 2'-O-methyl modified nucleotide
  modified_base 85: mod_base = OTHER; note = 2'-O-methyl modified nucleotide
  modified_base 86: mod_base = OTHER; note = 2'-O-methyl modified nucleotide
  modified_base 87: mod_base = OTHER; note = 2'-O-methyl modified nucleotide
  modified_base 88: mod_base = OTHER; note = 2'-O-methyl modified nucleotide
  modified_base 89: mod_base = OTHER; note = 2'-O-methyl modified nucleotide
  modified_base 90: mod_base = OTHER; note = 2'-O-methyl modified nucleotide
  modified_base 91: mod_base = OTHER; note = 2'-O-methyl modified nucleotide
  modified_base 92: mod_base = OTHER; note = 2'-O-methyl modified nucleotide
  modified_base 93: mod_base = OTHER; note = 2'-O-methyl modified nucleotide
  modified_base 94: mod_base = OTHER; note = 2'-O-methyl modified nucleotide
  modified_base 95: mod_base = OTHER; note = 2'-O-methyl modified nucleotide
  modified_base 96: mod_base = OTHER; note = 2'-O-methyl modified nucleotide
  modified_base 97: mod_base = OTHER; note = 2'-O-methyl modified nucleotide with phosphorothioate linkage
  modified_base 98: mod_base = OTHER; note = 2'-O-methyl modified nucleotide with phosphorothioate linkage
  modified_base 99: mod_base = OTHER; note = 2'-O-methyl modified nucleotide with phosphorothioate linkage
  modified_base 100: mod_base = OTHER; note = 2'-O-methyl modified nucleotide
  misc_difference 97..100: note = This region may encompass 0-4 nucleotides

SEQ ID NO: 2425 - RNA, 100 nt, synthetic construct; identical to SEQ ID NO: 1425
  source 1..100: mol_type = other RNA
  modified_base 1: mod_base = OTHER; note = 2'-O-methyl modified nucleotide with phosphorothioate linkage
  modified_base 2: mod_base = OTHER; note = 2'-O-methyl modified nucleotide with phosphorothioate linkage
  modified_base 3: mod_base = OTHER; note = 2'-O-methyl modified nucleotide with phosphorothioate linkage
  modified_base 29: mod_base = OTHER; note = 2'-O-methyl modified nucleotide
  modified_base 30: mod_base = OTHER; note = 2'-O-methyl modified nucleotide
  modified_base 31: mod_base = OTHER; note = 2'-O-methyl modified nucleotide
  modified_base 32: mod_base = OTHER; note = 2'-O-methyl modified nucleotide
  modified_base 33: mod_base = OTHER; note = 2'-O-methyl modified nucleotide
  modified_base 34: mod_base = OTHER; note = 2'-O-methyl modified nucleotide
  modified_base 35: mod_base = OTHER; note = 2'-O-methyl modified nucleotide
  modified_base 36: mod_base = OTHER; note = 2'-O-methyl modified nucleotide
  modified_base 37: mod_base = OTHER; note = 2'-O-methyl modified nucleotide
  modified_base 38: mod_base = OTHER; note = 2'-O-methyl modified nucleotide
  modified_base 39: mod_base = OTHER; note = 2'-O-methyl modified nucleotide
  modified_base 40: mod_base = OTHER; note = 2'-O-methyl modified nucleotide
  modified_base 69: mod_base = OTHER; note = 2'-O-methyl modified nucleotide
  modified_base 70: mod_base = OTHER; note = 2'-O-methyl modified nucleotide
  modified_base 71: mod_base = OTHER; note = 2'-O-methyl modified nucleotide
  modified_base 72: mod_base = OTHER; note = 2'-O-methyl modified nucleotide
  modified_base 73: mod_base = OTHER; note = 2'-O-methyl modified nucleotide
  modified_base 74: mod_base = OTHER; note = 2'-O-methyl modified nucleotide
  modified_base 75: mod_base = OTHER; note = 2'-O-methyl modified nucleotide
  modified_base 76: mod_base = OTHER; note = 2'-O-methyl modified nucleotide
  modified_base 77: mod_base = OTHER; note = 2'-O-methyl modified nucleotide
  modified_base 78: mod_base = OTHER; note = 2'-O-methyl modified nucleotide
  modified_base 79: mod_base = OTHER; note = 2'-O-methyl modified nucleotide
  modified_base 80: mod_base = OTHER; note = 2'-O-methyl modified nucleotide
  modified_base 81: mod_base = OTHER; note = 2'-O-methyl modified nucleotide
  modified_base 82: mod_base = OTHER; note = 2'-O-methyl modified nucleotide
  modified_base 83: mod_base = OTHER; note = 2'-O-methyl modified nucleotide
  modified_base 84: mod_base = OTHER; note = 2'-O-methyl modified nucleotide
  modified_base 85: mod_base = OTHER; note = 2'-O-methyl modified nucleotide
  modified_base 86: mod_base = OTHER; note = 2'-O-methyl modified nucleotide
  modified_base 87: mod_base = OTHER; note = 2'-O-methyl modified nucleotide
  modified_base 88: mod_base = OTHER; note = 2'-O-methyl modified nucleotide
  modified_base 89: mod_base = OTHER; note = 2'-O-methyl modified nucleotide
  modified_base 90: mod_base = OTHER; note = 2'-O-methyl modified nucleotide
  modified_base 91: mod_base = OTHER; note = 2'-O-methyl modified nucleotide
  modified_base 92: mod_base = OTHER; note = 2'-O-methyl modified nucleotide
  modified_base 93: mod_base = OTHER; note = 2'-O-methyl modified nucleotide
  modified_base 94: mod_base = OTHER; note = 2'-O-methyl modified nucleotide
  modified_base 95: mod_base = OTHER; note = 2'-O-methyl modified nucleotide
  modified_base 96: mod_base = OTHER; note = 2'-O-methyl modified nucleotide
  modified_base 97: mod_base = OTHER; note = 2'-O-methyl modified nucleotide with phosphorothioate linkage
  modified_base 98: mod_base = OTHER; note = 2'-O-methyl modified nucleotide with phosphorothioate linkage
  modified_base 99: mod_base = OTHER; note = 2'-O-methyl modified nucleotide with phosphorothioate linkage
  modified_base 100: mod_base = OTHER; note = 2'-O-methyl modified nucleotide
  misc_difference 97..100: note = This region may encompass 0-4 nucleotides

SEQ ID NO: 2426 - RNA, 100 nt, synthetic construct; identical to SEQ ID NO: 1426
  source 1..100: mol_type = other RNA
  modified_base 1: mod_base = OTHER; note = 2'-O-methyl modified nucleotide with phosphorothioate linkage
  modified_base 2: mod_base = OTHER; note = 2'-O-methyl modified nucleotide with phosphorothioate linkage
  modified_base 3: mod_base = OTHER; note = 2'-O-methyl modified nucleotide with phosphorothioate linkage
  modified_base 29: mod_base = OTHER; note = 2'-O-methyl modified nucleotide
  modified_base 30: mod_base = OTHER; note = 2'-O-methyl modified nucleotide
  modified_base 31: mod_base = OTHER; note = 2'-O-methyl modified nucleotide
  modified_base 32: mod_base = OTHER; note = 2'-O-methyl modified nucleotide
  modified_base 33: mod_base = OTHER; note = 2'-O-methyl modified nucleotide
  modified_base 34: mod_base = OTHER; note = 2'-O-methyl modified nucleotide
  modified_base 35: mod_base = OTHER; note = 2'-O-methyl modified nucleotide
  modified_base 36: mod_base = OTHER; note = 2'-O-methyl modified nucleotide
  modified_base 37: mod_base = OTHER; note = 2'-O-methyl modified nucleotide
  modified_base 38: mod_base = OTHER; note = 2'-O-methyl modified nucleotide
  modified_base 39: mod_base = OTHER; note = 2'-O-methyl modified nucleotide
  modified_base 40: mod_base = OTHER; note = 2'-O-methyl modified nucleotide
  modified_base 69: mod_base = OTHER; note = 2'-O-methyl modified nucleotide
  modified_base 70: mod_base = OTHER; note = 2'-O-methyl modified nucleotide
  modified_base 71: mod_base = OTHER; note = 2'-O-methyl modified nucleotide
  modified_base 72: mod_base = OTHER; note = 2'-O-methyl modified nucleotide
  modified_base 73: mod_base = OTHER; note = 2'-O-methyl modified nucleotide
  modified_base 74: mod_base = OTHER; note = 2'-O-methyl modified nucleotide
  modified_base 75: mod_base = OTHER; note = 2'-O-methyl modified nucleotide
  modified_base 76: mod_base = OTHER; note = 2'-O-methyl modified nucleotide
  modified_base 77: mod_base = OTHER; note = 2'-O-methyl modified nucleotide
  modified_base 78: mod_base = OTHER; note = 2'-O-methyl modified nucleotide
  modified_base 79: mod_base = OTHER; note = 2'-O-methyl modified nucleotide
  modified_base 80: mod_base = OTHER; note = 2'-O-methyl modified nucleotide
  modified_base 81: mod_base = OTHER; note = 2'-O-methyl modified nucleotide
  modified_base 82: mod_base = OTHER; note = 2'-O-methyl modified nucleotide
  modified_base 83: mod_base = OTHER; note = 2'-O-methyl modified nucleotide
  modified_base 84: mod_base = OTHER; note = 2'-O-methyl modified nucleotide
  modified_base 85: mod_base = OTHER; note = 2'-O-methyl modified nucleotide
  modified_base 86: mod_base = OTHER; note = 2'-O-methyl modified nucleotide
  modified_base 87: mod_base = OTHER; note = 2'-O-methyl modified nucleotide
  modified_base 88: mod_base = OTHER; note = 2'-O-methyl modified nucleotide
  modified_base 89: mod_base = OTHER; note = 2'-O-methyl modified nucleotide
  modified_base 90: mod_base = OTHER; note = 2'-O-methyl modified nucleotide
  modified_base 91: mod_base = OTHER; note = 2'-O-methyl modified nucleotide
  modified_base 92: mod_base = OTHER; note = 2'-O-methyl modified nucleotide
  modified_base 93: mod_base = OTHER; note = 2'-O-methyl modified nucleotide
  modified_base 94: mod_base = OTHER; note = 2'-O-methyl modified nucleotide
  modified_base 95: mod_base = OTHER; note = 2'-O-methyl modified nucleotide
  modified_base 96: mod_base = OTHER; note = 2'-O-methyl modified nucleotide
  modified_base 97: mod_base = OTHER; note = 2'-O-methyl modified nucleotide with phosphorothioate linkage
  modified_base 98: mod_base = OTHER; note = 2'-O-methyl modified nucleotide with phosphorothioate linkage
  modified_base 99: mod_base = OTHER; note = 2'-O-methyl modified nucleotide with phosphorothioate linkage
  modified_base 100: mod_base = OTHER; note = 2'-O-methyl modified nucleotide
  misc_difference 97..100: note = This region may encompass 0-4 nucleotides

SEQ ID NO: 2427 - RNA, 100 nt, synthetic construct; identical to SEQ ID NO: 1427
  source 1..100: mol_type = other RNA
  modified_base 1: mod_base = OTHER; note = 2'-O-methyl modified nucleotide with phosphorothioate linkage
  modified_base 2: mod_base = OTHER; note = 2'-O-methyl modified nucleotide with phosphorothioate linkage
  modified_base 3: mod_base = OTHER; note = 2'-O-methyl modified nucleotide with phosphorothioate linkage
  modified_base 29: mod_base = OTHER; note = 2'-O-methyl modified nucleotide
  modified_base 30: mod_base = OTHER; note = 2'-O-methyl modified nucleotide
  modified_base 31: mod_base = OTHER; note = 2'-O-methyl modified nucleotide
  modified_base 32: mod_base = OTHER; note = 2'-O-methyl modified nucleotide
  modified_base 33: mod_base = OTHER; note = 2'-O-methyl modified nucleotide
  modified_base 34: mod_base = OTHER; note = 2'-O-methyl modified nucleotide
  modified_base 35: mod_base = OTHER; note = 2'-O-methyl modified nucleotide
  modified_base 36: mod_base = OTHER; note = 2'-O-methyl modified nucleotide
  modified_base 37: mod_base = OTHER; note = 2'-O-methyl modified nucleotide
  modified_base 38: mod_base = OTHER; note = 2'-O-methyl modified nucleotide
  modified_base 39: mod_base = OTHER; note = 2'-O-methyl modified nucleotide
  modified_base 40: mod_base = OTHER; note = 2'-O-methyl modified nucleotide
  modified_base 69: mod_base = OTHER; note = 2'-O-methyl modified nucleotide
  modified_base 70: mod_base = OTHER; note = 2'-O-methyl modified nucleotide
  modified_base 71: mod_base = OTHER; note = 2'-O-methyl modified nucleotide
  modified_base 72: mod_base = OTHER; note = 2'-O-methyl modified nucleotide
  modified_base 73: mod_base = OTHER; note = 2'-O-methyl modified nucleotide
  modified_base 74: mod_base = OTHER; note = 2'-O-methyl modified nucleotide
  modified_base 75: mod_base = OTHER; note = 2'-O-methyl modified nucleotide
  modified_base 76: mod_base = OTHER; note = 2'-O-methyl modified nucleotide
  modified_base 77: mod_base = OTHER; note = 2'-O-methyl modified nucleotide
  modified_base 78: mod_base = OTHER; note = 2'-O-methyl modified nucleotide
  modified_base 79: mod_base = OTHER; note = 2'-O-methyl modified nucleotide
  modified_base 80: mod_base = OTHER; note = 2'-O-methyl modified nucleotide
  modified_base 81: mod_base = OTHER; note = 2'-O-methyl modified nucleotide
  modified_base 82: mod_base = OTHER; note = 2'-O-methyl modified nucleotide
  modified_base 83: mod_base = OTHER; note = 2'-O-methyl modified nucleotide
  modified_base 84: mod_base = OTHER; note = 2'-O-methyl modified nucleotide
  modified_base 85: mod_base = OTHER; note = 2'-O-methyl modified nucleotide
  modified_base 86: mod_base = OTHER; note = 2'-O-methyl modified nucleotide
  modified_base 87: mod_base = OTHER; note = 2'-O-methyl modified nucleotide
  modified_base 88: mod_base = OTHER; note = 2'-O-methyl modified nucleotide
  modified_base 89: mod_base = OTHER; note = 2'-O-methyl modified nucleotide
  modified_base 90: mod_base = OTHER; note = 2'-O-methyl modified nucleotide
  modified_base 91: mod_base = OTHER; note = 2'-O-methyl modified nucleotide
  modified_base 92: mod_base = OTHER; note = 2'-O-methyl modified nucleotide
  modified_base 93: mod_base = OTHER; note = 2'-O-methyl modified nucleotide
  modified_base 94: mod_base = OTHER; note = 2'-O-methyl modified nucleotide
  modified_base 95: mod_base = OTHER; note = 2'-O-methyl modified nucleotide
  modified_base 96: mod_base = OTHER; note = 2'-O-methyl modified nucleotide
  modified_base 97: mod_base = OTHER; note = 2'-O-methyl modified nucleotide with phosphorothioate linkage
  modified_base 98: mod_base = OTHER; note = 2'-O-methyl modified nucleotide with phosphorothioate linkage
  modified_base 99: mod_base = OTHER; note = 2'-O-methyl modified nucleotide with phosphorothioate linkage
  modified_base 100: mod_base = OTHER; note = 2'-O-methyl modified nucleotide
  misc_difference 97..100: note = This region may encompass 0-4 nucleotides

SEQ ID NO: 2428 - RNA, 100 nt, synthetic construct; identical to SEQ ID NO: 1428
  source 1..100: mol_type = other RNA
  modified_base 1: mod_base = OTHER; note = 2'-O-methyl modified nucleotide with phosphorothioate linkage
  modified_base 2: mod_base = OTHER; note = 2'-O-methyl modified nucleotide with phosphorothioate linkage
  modified_base 3: mod_base = OTHER; note = 2'-O-methyl modified nucleotide with phosphorothioate linkage
  modified_base 29: mod_base = OTHER; note = 2'-O-methyl modified nucleotide
  modified_base 30: mod_base = OTHER; note = 2'-O-methyl modified nucleotide
  modified_base 31: mod_base = OTHER; note = 2'-O-methyl modified nucleotide
  modified_base 32: mod_base = OTHER; note = 2'-O-methyl modified nucleotide
  modified_base 33: mod_base = OTHER; note = 2'-O-methyl modified nucleotide
  modified_base 34: mod_base = OTHER; note = 2'-O-methyl modified nucleotide
  modified_base 35: mod_base = OTHER; note = 2'-O-methyl modified nucleotide
  modified_base 36: mod_base = OTHER; note = 2'-O-methyl modified nucleotide
  modified_base 37: mod_base = OTHER; note = 2'-O-methyl modified nucleotide
  modified_base 38: mod_base = OTHER; note = 2'-O-methyl modified nucleotide
  modified_base 39: mod_base = OTHER; note = 2'-O-methyl modified nucleotide
  modified_base 40: mod_base = OTHER; note = 2'-O-methyl modified nucleotide
  modified_base 69: mod_base = OTHER; note = 2'-O-methyl modified nucleotide
  modified_base 70: mod_base = OTHER; note = 2'-O-methyl modified nucleotide
  modified_base 71: mod_base = OTHER; note = 2'-O-methyl modified nucleotide
  modified_base 72: mod_base = OTHER; note = 2'-O-methyl modified nucleotide
  modified_base 73: mod_base = OTHER; note = 2'-O-methyl modified nucleotide
  modified_base 74: mod_base = OTHER; note = 2'-O-methyl modified nucleotide
  modified_base 75: mod_base = OTHER; note = 2'-O-methyl modified nucleotide
  modified_base 76: mod_base = OTHER; note = 2'-O-methyl modified nucleotide
  modified_base 77: mod_base = OTHER; note = 2'-O-methyl modified nucleotide
  modified_base 78: mod_base = OTHER; note = 2'-O-methyl modified nucleotide
  modified_base 79: mod_base = OTHER; note = 2'-O-methyl modified nucleotide
  modified_base 80: mod_base = OTHER; note = 2'-O-methyl modified nucleotide
  modified_base 81: mod_base = OTHER; note = 2'-O-methyl modified nucleotide
  modified_base 82: mod_base = OTHER; note = 2'-O-methyl modified nucleotide
  modified_base 83: mod_base = OTHER; note = 2'-O-methyl modified nucleotide
  modified_base 84: mod_base = OTHER; note = 2'-O-methyl modified nucleotide
  modified_base 85: mod_base = OTHER; note = 2'-O-methyl modified nucleotide
  modified_base 86: mod_base = OTHER; note = 2'-O-methyl modified nucleotide
  modified_base 87: mod_base = OTHER; note = 2'-O-methyl modified nucleotide
  modified_base 88: mod_base = OTHER; note = 2'-O-methyl modified nucleotide
  modified_base 89: mod_base = OTHER; note = 2'-O-methyl modified nucleotide
  modified_base 90: mod_base = OTHER; note = 2'-O-methyl modified nucleotide
  modified_base 91: mod_base = OTHER; note = 2'-O-methyl modified nucleotide
  modified_base 92: mod_base = OTHER; note = 2'-O-methyl modified nucleotide
  modified_base 93: mod_base = OTHER; note = 2'-O-methyl modified nucleotide
  modified_base 94: mod_base = OTHER; note = 2'-O-methyl modified nucleotide
  modified_base 95: mod_base = OTHER; note = 2'-O-methyl modified nucleotide
  modified_base 96: mod_base = OTHER; note = 2'-O-methyl modified nucleotide
  modified_base 97: mod_base = OTHER; note = 2'-O-methyl modified nucleotide with phosphorothioate linkage
  modified_base 98: mod_base = OTHER; note = 2'-O-methyl modified nucleotide with phosphorothioate linkage
  modified_base 99: mod_base = OTHER; note = 2'-O-methyl modified nucleotide with phosphorothioate linkage
  modified_base 100: mod_base = OTHER; note = 2'-O-methyl modified nucleotide
  misc_difference 97..100: note = This region may encompass 0-4 nucleotides

SEQ ID NO: 2429-2482 - skipped (54 entries)

SEQ ID NO: 2483 - RNA, 100 nt, synthetic construct; identical to SEQ ID NO: 1483
  source 1..100: mol_type = other RNA
  modified_base 1: mod_base = OTHER; note = 2'-O-methyl modified nucleotide with phosphorothioate linkage
  modified_base 2: mod_base = OTHER; note = 2'-O-methyl modified nucleotide with phosphorothioate linkage
  modified_base 3: mod_base = OTHER; note = 2'-O-methyl modified nucleotide with phosphorothioate linkage
  modified_base 29: mod_base = OTHER; note = 2'-O-methyl modified nucleotide
  modified_base 30: mod_base = OTHER; note = 2'-O-methyl modified nucleotide
  modified_base 31: mod_base = OTHER; note = 2'-O-methyl modified nucleotide
  modified_base 32: mod_base = OTHER; note = 2'-O-methyl modified nucleotide
  modified_base 33: mod_base = OTHER; note = 2'-O-methyl modified nucleotide
  modified_base 34: mod_base = OTHER; note = 2'-O-methyl modified nucleotide
  modified_base 35: mod_base = OTHER; note = 2'-O-methyl modified nucleotide
  modified_base 36: mod_base = OTHER; note = 2'-O-methyl modified nucleotide
  modified_base 37: mod_base = OTHER; note = 2'-O-methyl modified nucleotide
  modified_base 38: mod_base = OTHER; note = 2'-O-methyl modified nucleotide
  modified_base 39: mod_base = OTHER; note = 2'-O-methyl modified nucleotide
  modified_base 40: mod_base = OTHER; note = 2'-O-methyl modified nucleotide
  modified_base 69: mod_base = OTHER; note = 2'-O-methyl modified nucleotide
  modified_base 70: mod_base = OTHER; note = 2'-O-methyl modified nucleotide
  modified_base 71: mod_base = OTHER; note = 2'-O-methyl modified nucleotide
  modified_base 72: mod_base = OTHER; note = 2'-O-methyl modified nucleotide
  modified_base 73: mod_base = OTHER; note = 2'-O-methyl modified nucleotide
  modified_base 74: mod_base = OTHER; note = 2'-O-methyl modified nucleotide
  modified_base 75: mod_base = OTHER; note = 2'-O-methyl modified nucleotide
  modified_base 76: mod_base = OTHER; note = 2'-O-methyl modified nucleotide
  modified_base 77: mod_base = OTHER; note = 2'-O-methyl modified nucleotide
  modified_base 78: mod_base = OTHER; note = 2'-O-methyl modified nucleotide
  modified_base 79: mod_base = OTHER; note = 2'-O-methyl modified nucleotide
  modified_base 80: mod_base = OTHER; note = 2'-O-methyl modified nucleotide
  modified_base 81: mod_base = OTHER; note = 2'-O-methyl modified nucleotide
  modified_base 82: mod_base = OTHER; note = 2'-O-methyl modified nucleotide
  modified_base 83: mod_base = OTHER; note = 2'-O-methyl modified nucleotide
  modified_base 84: mod_base = OTHER; note = 2'-O-methyl modified nucleotide
  modified_base 85: mod_base = OTHER; note = 2'-O-methyl modified nucleotide
  modified_base 86: mod_base = OTHER; note = 2'-O-methyl modified nucleotide
  modified_base 87: mod_base = OTHER; note = 2'-O-methyl modified nucleotide
  modified_base 88: mod_base = OTHER; note = 2'-O-methyl modified nucleotide
  modified_base 89: mod_base = OTHER; note = 2'-O-methyl modified nucleotide
  modified_base 90: mod_base = OTHER; note = 2'-O-methyl modified nucleotide
  modified_base 91: mod_base = OTHER; note = 2'-O-methyl modified nucleotide
  modified_base 92: mod_base = OTHER; note = 2'-O-methyl modified nucleotide
  modified_base 93: mod_base = OTHER; note = 2'-O-methyl modified nucleotide
  modified_base 94: mod_base = OTHER; note = 2'-O-methyl modified nucleotide
  modified_base 95: mod_base = OTHER; note = 2'-O-methyl modified nucleotide
  modified_base 96: mod_base = OTHER; note = 2'-O-methyl modified nucleotide
  modified_base 97: mod_base = OTHER; note = 2'-O-methyl modified nucleotide with phosphorothioate linkage
  modified_base 98: mod_base = OTHER; note = 2'-O-methyl modified nucleotide with phosphorothioate linkage
  modified_base 99: mod_base = OTHER; note = 2'-O-methyl modified nucleotide with phosphorothioate linkage
  modified_base 100: mod_base = OTHER; note = 2'-O-methyl modified nucleotide
  misc_difference 97..100: note = This region may encompass 0-4 nucleotides

SEQ ID NO: 2484 - RNA, 100 nt, synthetic construct; identical to SEQ ID NO: 1484
  source 1..100: mol_type = other RNA
  modified_base 1: mod_base = OTHER; note = 2'-O-methyl modified nucleotide with phosphorothioate linkage
  modified_base 2: mod_base = OTHER; note = 2'-O-methyl modified nucleotide with phosphorothioate linkage
  modified_base 3: mod_base = OTHER; note = 2'-O-methyl modified nucleotide with phosphorothioate linkage
  modified_base 29: mod_base = OTHER; note = 2'-O-methyl modified nucleotide
  modified_base 30: mod_base = OTHER; note = 2'-O-methyl modified nucleotide
  modified_base 31: mod_base = OTHER; note = 2'-O-methyl modified nucleotide
  modified_base 32: mod_base = OTHER; note = 2'-O-methyl modified nucleotide
  modified_base 33: mod_base = OTHER; note = 2'-O-methyl modified nucleotide
  modified_base 34: mod_base = OTHER; note = 2'-O-methyl modified nucleotide
  modified_base 35: mod_base = OTHER; note = 2'-O-methyl modified nucleotide
  modified_base 36: mod_base = OTHER; note = 2'-O-methyl modified nucleotide
  modified_base 37: mod_base = OTHER; note = 2'-O-methyl modified nucleotide
  modified_base 38: mod_base = OTHER; note = 2'-O-methyl modified nucleotide
  modified_base 39: mod_base = OTHER; note = 2'-O-methyl modified nucleotide
  modified_base 40: mod_base = OTHER; note = 2'-O-methyl modified nucleotide
  modified_base 69: mod_base = OTHER; note = 2'-O-methyl modified nucleotide
  modified_base 70: mod_base = OTHER; note = 2'-O-methyl modified nucleotide
  modified_base 71: mod_base = OTHER; note = 2'-O-methyl modified nucleotide
  modified_base 72: mod_base = OTHER; note = 2'-O-methyl modified nucleotide
  modified_base 73: mod_base = OTHER; note = 2'-O-methyl modified nucleotide
  modified_base 74: mod_base = OTHER; note = 2'-O-methyl modified nucleotide
  modified_base 75: mod_base = OTHER; note = 2'-O-methyl modified nucleotide
  modified_base 76: mod_base = OTHER; note = 2'-O-methyl modified nucleotide
  modified_base 77: mod_base = OTHER; note = 2'-O-methyl modified nucleotide
  modified_base 78: mod_base = OTHER; note = 2'-O-methyl modified nucleotide
  modified_base 79: mod_base = OTHER; note = 2'-O-methyl modified nucleotide
  modified_base 80: mod_base = OTHER; note = 2'-O-methyl modified nucleotide
  modified_base 81: mod_base = OTHER; note = 2'-O-methyl modified nucleotide
  modified_base 82: mod_base = OTHER; note = 2'-O-methyl modified nucleotide
  modified_base 83: mod_base = OTHER; note = 2'-O-methyl modified nucleotide
  modified_base 84: mod_base = OTHER; note = 2'-O-methyl modified nucleotide
  modified_base 85: mod_base = OTHER; note = 2'-O-methyl modified nucleotide
  modified_base 86: mod_base = OTHER; note = 2'-O-methyl modified nucleotide
  modified_base 87: mod_base = OTHER; note = 2'-O-methyl modified nucleotide
  modified_base 88: mod_base = OTHER; note = 2'-O-methyl modified nucleotide
  modified_base 89: mod_base = OTHER; note = 2'-O-methyl modified nucleotide
  modified_base 90: mod_base = OTHER; note = 2'-O-methyl modified nucleotide
  modified_base 91: mod_base = OTHER; note = 2'-O-methyl modified nucleotide
  modified_base 92: mod_base = OTHER; note = 2'-O-methyl modified nucleotide
  modified_base 93: mod_base = OTHER; note = 2'-O-methyl modified nucleotide
  modified_base 94: mod_base = OTHER; note = 2'-O-methyl modified nucleotide
  modified_base 95: mod_base = OTHER; note = 2'-O-methyl modified nucleotide
  modified_base 96: mod_base = OTHER; note = 2'-O-methyl modified nucleotide
  modified_base 97: mod_base = OTHER; note = 2'-O-methyl modified nucleotide with phosphorothioate linkage
  modified_base 98: mod_base = OTHER; note = 2'-O-methyl modified nucleotide with phosphorothioate linkage
  modified_base 99: mod_base = OTHER; note = 2'-O-methyl modified nucleotide with phosphorothioate linkage
  modified_base 100: mod_base = OTHER; note = 2'-O-methyl modified nucleotide
  misc_difference 97..100: note = This region may encompass 0-4 nucleotides

SEQ ID NO: 2485 - RNA, 100 nt, synthetic construct; identical to SEQ ID NO: 1485
  source 1..100: mol_type = other RNA
  modified_base 1: mod_base = OTHER; note = 2'-O-methyl modified nucleotide with phosphorothioate linkage
  modified_base 2: mod_base = OTHER; note = 2'-O-methyl modified nucleotide with phosphorothioate linkage
  modified_base 3: mod_base = OTHER; note = 2'-O-methyl modified nucleotide with phosphorothioate linkage
  modified_base 29: mod_base = OTHER; note = 2'-O-methyl modified nucleotide
  modified_base 30: mod_base = OTHER; note = 2'-O-methyl modified nucleotide
  modified_base 31: mod_base = OTHER; note = 2'-O-methyl modified nucleotide
  modified_base 32: mod_base = OTHER; note = 2'-O-methyl modified nucleotide
  modified_base 33: mod_base = OTHER; note = 2'-O-methyl modified nucleotide
  modified_base 34: mod_base = OTHER; note = 2'-O-methyl modified nucleotide
  modified_base 35: mod_base = OTHER; note = 2'-O-methyl modified nucleotide
  modified_base 36: mod_base = OTHER; note = 2'-O-methyl modified nucleotide
  modified_base 37: mod_base = OTHER; note = 2'-O-methyl modified nucleotide
  modified_base 38: mod_base = OTHER; note = 2'-O-methyl modified nucleotide
  modified_base 39: mod_base = OTHER; note = 2'-O-methyl modified nucleotide
  modified_base 40: mod_base = OTHER; note = 2'-O-methyl modified nucleotide
  modified_base 69: mod_base = OTHER; note = 2'-O-methyl modified nucleotide
  modified_base 70: mod_base = OTHER; note = 2'-O-methyl modified nucleotide
  modified_base 71: mod_base = OTHER; note = 2'-O-methyl modified nucleotide
  modified_base 72: mod_base = OTHER; note = 2'-O-methyl modified nucleotide
  modified_base 73: mod_base = OTHER; note = 2'-O-methyl modified nucleotide
  modified_base 74: mod_base = OTHER; note = 2'-O-methyl modified nucleotide
  modified_base 75: mod_base = OTHER; note = 2'-O-methyl modified nucleotide
  modified_base 76: mod_base = OTHER; note = 2'-O-methyl modified nucleotide
  modified_base 77: mod_base = OTHER; note = 2'-O-methyl modified nucleotide
  modified_base 78: mod_base = OTHER; note = 2'-O-methyl modified nucleotide
  modified_base 79: mod_base = OTHER; note = 2'-O-methyl modified nucleotide
  modified_base 80: mod_base = OTHER; note = 2'-O-methyl modified nucleotide
  modified_base 81: mod_base = OTHER; note = 2'-O-methyl modified nucleotide
  modified_base 82: mod_base = OTHER; note = 2'-O-methyl modified nucleotide
  modified_base 83: mod_base = OTHER; note = 2'-O-methyl modified nucleotide
  modified_base 84: mod_base = OTHER; note = 2'-O-methyl modified nucleotide
  modified_base 85: mod_base = OTHER; note = 2'-O-methyl modified nucleotide
  modified_base 86: mod_base = OTHER; note = 2'-O-methyl modified nucleotide
  modified_base 87: mod_base = OTHER; note = 2'-O-methyl modified nucleotide
  modified_base 88: mod_base = OTHER; note = 2'-O-methyl modified nucleotide
  modified_base 89: mod_base = OTHER; note = 2'-O-methyl modified nucleotide
  modified_base 90: mod_base = OTHER; note = 2'-O-methyl modified nucleotide
  modified_base 91: mod_base = OTHER; note = 2'-O-methyl modified nucleotide
  modified_base 92: mod_base = OTHER; note = 2'-O-methyl modified nucleotide
  modified_base 93: mod_base = OTHER; note = 2'-O-methyl modified nucleotide
  modified_base 94: mod_base = OTHER; note = 2'-O-methyl modified nucleotide
  modified_base 95: mod_base = OTHER; note = 2'-O-methyl modified nucleotide
  modified_base 96: mod_base = OTHER; note = 2'-O-methyl modified nucleotide
  modified_base 97: mod_base = OTHER; note = 2'-O-methyl modified nucleotide with phosphorothioate linkage
  modified_base 98: mod_base = OTHER; note = 2'-O-methyl modified nucleotide with phosphorothioate linkage
  modified_base 99: mod_base = OTHER; note = 2'-O-methyl modified nucleotide with phosphorothioate linkage
  modified_base 100: mod_base = OTHER; note = 2'-O-methyl modified nucleotide
  misc_difference 97..100: note = This region may encompass 0-4 nucleotides

SEQ ID NO: 2486 - RNA, 100 nt, synthetic construct; identical to SEQ ID NO: 1486
  source 1..100: mol_type = other RNA
  modified_base 1: mod_base = OTHER; note = 2'-O-methyl modified nucleotide with phosphorothioate linkage
  modified_base 2: mod_base = OTHER; note = 2'-O-methyl modified nucleotide with phosphorothioate linkage
  modified_base 3: mod_base = OTHER; note = 2'-O-methyl modified nucleotide with phosphorothioate linkage
  modified_base 29: mod_base = OTHER; note = 2'-O-methyl modified nucleotide
  modified_base 30: mod_base = OTHER; note = 2'-O-methyl modified nucleotide
  modified_base 31: mod_base = OTHER; note = 2'-O-methyl modified nucleotide
  modified_base 32: mod_base = OTHER; note = 2'-O-methyl modified nucleotide
  modified_base 33: mod_base = OTHER; note = 2'-O-methyl modified nucleotide
  modified_base 34: mod_base = OTHER; note = 2'-O-methyl modified nucleotide
  modified_base 35: mod_base = OTHER; note = 2'-O-methyl modified nucleotide
  modified_base 36: mod_base = OTHER; note = 2'-O-methyl modified nucleotide
  modified_base 37: mod_base = OTHER; note = 2'-O-methyl modified nucleotide
  modified_base 38: mod_base = OTHER; note = 2'-O-methyl modified nucleotide
  modified_base 39: mod_base = OTHER; note = 2'-O-methyl modified nucleotide
  modified_base 40: mod_base = OTHER; note = 2'-O-methyl modified nucleotide
  modified_base 69: mod_base = OTHER; note = 2'-O-methyl modified nucleotide
  modified_base 70: mod_base = OTHER; note = 2'-O-methyl modified nucleotide
  modified_base 71: mod_base = OTHER; note = 2'-O-methyl modified nucleotide
  modified_base 72: mod_base = OTHER; note = 2'-O-methyl modified nucleotide
  modified_base 73: mod_base = OTHER; note = 2'-O-methyl modified nucleotide
  modified_base 74: mod_base = OTHER; note = 2'-O-methyl modified nucleotide
  modified_base 75: mod_base = OTHER; note = 2'-O-methyl modified nucleotide
  modified_base 76: mod_base = OTHER; note = 2'-O-methyl modified nucleotide
  modified_base 77: mod_base = OTHER; note = 2'-O-methyl modified nucleotide
  modified_base 78: mod_base = OTHER; note = 2'-O-methyl modified nucleotide
  modified_base 79: mod_base = OTHER; note = 2'-O-methyl modified nucleotide
  modified_base 80: mod_base = OTHER; note = 2'-O-methyl modified nucleotide
  modified_base 81: mod_base = OTHER; note = 2'-O-methyl modified nucleotide
  modified_base 82: mod_base = OTHER; note = 2'-O-methyl modified nucleotide
  modified_base 83: mod_base = OTHER; note = 2'-O-methyl modified nucleotide
  modified_base 84: mod_base = OTHER; note = 2'-O-methyl modified nucleotide
  modified_base 85: mod_base = OTHER; note = 2'-O-methyl modified nucleotide
  modified_base 86: mod_base = OTHER; note = 2'-O-methyl modified nucleotide
  modified_base 87: mod_base = OTHER; note = 2'-O-methyl modified nucleotide
  modified_base 88: mod_base = OTHER; note = 2'-O-methyl modified nucleotide
  modified_base 89: mod_base = OTHER; note = 2'-O-methyl modified nucleotide
  modified_base 90: mod_base = OTHER; note = 2'-O-methyl modified nucleotide
  modified_base 91: mod_base = OTHER; note = 2'-O-methyl modified nucleotide
  modified_base 92: mod_base = OTHER; note = 2'-O-methyl modified nucleotide
  modified_base 93: mod_base = OTHER; note = 2'-O-methyl modified nucleotide
  modified_base 94: mod_base = OTHER; note = 2'-O-methyl modified nucleotide
  modified_base 95: mod_base = OTHER; note = 2'-O-methyl modified nucleotide
  modified_base 96: mod_base = OTHER; note = 2'-O-methyl modified nucleotide
  modified_base 97: mod_base = OTHER; note = 2'-O-methyl modified nucleotide with phosphorothioate linkage
  modified_base 98: mod_base = OTHER; note = 2'-O-methyl modified nucleotide with phosphorothioate linkage
  modified_base 99: mod_base = OTHER; note = 2'-O-methyl modified nucleotide with phosphorothioate linkage
  modified_base 100: mod_base = OTHER; note = 2'-O-methyl modified nucleotide
  misc_difference 97..100: note = This region may encompass 0-4 nucleotides

SEQ ID NO: 2487 - RNA, 100 nt, synthetic construct; identical to SEQ ID NO: 1487
  source 1..100: mol_type = other RNA
  modified_base 1: mod_base = OTHER; note = 2'-O-methyl modified nucleotide with phosphorothioate linkage
  modified_base 2: mod_base = OTHER; note = 2'-O-methyl modified nucleotide with phosphorothioate linkage
  modified_base 3: mod_base = OTHER; note = 2'-O-methyl modified nucleotide with phosphorothioate linkage
  modified_base 29: mod_base = OTHER; note = 2'-O-methyl modified nucleotide
  modified_base 30: mod_base = OTHER; note = 2'-O-methyl modified nucleotide
  modified_base 31: mod_base = OTHER; note = 2'-O-methyl modified nucleotide
  modified_base 32: mod_base = OTHER; note = 2'-O-methyl modified nucleotide
  modified_base 33: mod_base = OTHER; note = 2'-O-methyl modified nucleotide
  modified_base 34: mod_base = OTHER; note = 2'-O-methyl modified nucleotide
  modified_base 35: mod_base = OTHER; note = 2'-O-methyl modified nucleotide
  modified_base 36: mod_base = OTHER; note = 2'-O-methyl modified nucleotide
  modified_base 37: mod_base = OTHER; note = 2'-O-methyl modified nucleotide
  modified_base 38: mod_base = OTHER; note = 2'-O-methyl modified nucleotide
  modified_base 39: mod_base = OTHER; note = 2'-O-methyl modified nucleotide
  modified_base 40: mod_base = OTHER; note = 2'-O-methyl modified nucleotide
  modified_base 69: mod_base = OTHER; note = 2'-O-methyl modified nucleotide
  modified_base 70: mod_base = OTHER; note = 2'-O-methyl modified nucleotide
  modified_base 71: mod_base = OTHER; note = 2'-O-methyl modified nucleotide
  modified_base 72: mod_base = OTHER; note = 2'-O-methyl modified nucleotide
  modified_base 73: mod_base = OTHER; note = 2'-O-methyl modified nucleotide
  modified_base 74: mod_base = OTHER; note = 2'-O-methyl modified nucleotide
  modified_base 75: mod_base = OTHER; note = 2'-O-methyl modified nucleotide
  modified_base 76: mod_base = OTHER; note = 2'-O-methyl modified nucleotide
  modified_base 77: mod_base = OTHER; note = 2'-O-methyl modified nucleotide
  modified_base 78: mod_base = OTHER; note = 2'-O-methyl modified nucleotide
  modified_base 79: mod_base = OTHER; note = 2'-O-methyl modified nucleotide
  modified_base 80: mod_base = OTHER; note = 2'-O-methyl modified nucleotide
  modified_base 81: mod_base = OTHER; note = 2'-O-methyl modified nucleotide
  modified_base 82: mod_base = OTHER; note = 2'-O-methyl modified nucleotide
  modified_base 83: mod_base = OTHER; note = 2'-O-methyl modified nucleotide
  modified_base 84: mod_base = OTHER; note = 2'-O-methyl modified nucleotide
  modified_base 85: mod_base = OTHER; note = 2'-O-methyl modified nucleotide
  modified_base 86: mod_base = OTHER; note = 2'-O-methyl modified nucleotide
  modified_base 87: mod_base = OTHER; note = 2'-O-methyl modified nucleotide
  modified_base 88: mod_base = OTHER; note = 2'-O-methyl modified nucleotide
  modified_base 89: mod_base = OTHER; note = 2'-O-methyl modified nucleotide
  modified_base 90: mod_base = OTHER; note = 2'-O-methyl modified nucleotide
  modified_base 91: mod_base = OTHER; note = 2'-O-methyl modified nucleotide
  modified_base 92: mod_base = OTHER; note = 2'-O-methyl modified nucleotide
  modified_base 93: mod_base = OTHER; note = 2'-O-methyl modified nucleotide
  modified_base 94: mod_base = OTHER; note = 2'-O-methyl modified nucleotide
  modified_base 95: mod_base = OTHER; note = 2'-O-methyl modified nucleotide
  modified_base 96: mod_base = OTHER; note = 2'-O-methyl modified nucleotide
  modified_base 97: mod_base = OTHER; note = 2'-O-methyl modified nucleotide with phosphorothioate linkage
  modified_base 98: mod_base = OTHER; note = 2'-O-methyl modified nucleotide with phosphorothioate linkage
  modified_base 99: mod_base = OTHER; note = 2'-O-methyl modified nucleotide with phosphorothioate linkage
  modified_base 100: mod_base = OTHER; note = 2'-O-methyl modified nucleotide
  misc_difference 97..100: note = This region may encompass 0-4 nucleotides

SEQ ID NO: 2488 - RNA, 100 nt, synthetic construct; identical to SEQ ID NO: 1488
  source 1..100: mol_type = other RNA
  modified_base 1: mod_base = OTHER; note = 2'-O-methyl modified nucleotide with phosphorothioate linkage
  modified_base 2: mod_base = OTHER; note = 2'-O-methyl modified nucleotide with phosphorothioate linkage
  modified_base 3: mod_base = OTHER; note = 2'-O-methyl modified nucleotide with phosphorothioate linkage
  modified_base 29: mod_base = OTHER; note = 2'-O-methyl modified nucleotide
  modified_base 30: mod_base = OTHER; note = 2'-O-methyl modified nucleotide
  modified_base 31: mod_base = OTHER; note = 2'-O-methyl modified nucleotide
  modified_base 32: mod_base = OTHER; note = 2'-O-methyl modified nucleotide
  modified_base 33: mod_base = OTHER; note = 2'-O-methyl modified nucleotide
  modified_base 34: mod_base = OTHER; note = 2'-O-methyl modified nucleotide
  modified_base 35: mod_base = OTHER; note = 2'-O-methyl modified nucleotide
  modified_base 36: mod_base = OTHER; note = 2'-O-methyl modified nucleotide
  modified_base 37: mod_base = OTHER; note = 2'-O-methyl modified nucleotide
  modified_base 38: mod_base = OTHER; note = 2'-O-methyl modified nucleotide
  modified_base 39: mod_base = OTHER; note = 2'-O-methyl modified nucleotide
  modified_base 40: mod_base = OTHER; note = 2'-O-methyl modified nucleotide
  modified_base 69: mod_base = OTHER; note = 2'-O-methyl modified nucleotide
  modified_base 70: mod_base = OTHER; note = 2'-O-methyl modified nucleotide
  modified_base 71: mod_base = OTHER; note = 2'-O-methyl modified nucleotide
  modified_base 72: mod_base = OTHER; note = 2'-O-methyl modified nucleotide
  modified_base 73: mod_base = OTHER; note = 2'-O-methyl modified nucleotide
  modified_base 74: mod_base = OTHER; note = 2'-O-methyl modified nucleotide
  modified_base 75: mod_base = OTHER; note = 2'-O-methyl modified nucleotide
  modified_base 76: mod_base = OTHER; note = 2'-O-methyl modified nucleotide
  modified_base 77: mod_base = OTHER; note = 2'-O-methyl modified nucleotide
  modified_base 78: mod_base = OTHER; note = 2'-O-methyl modified nucleotide
  modified_base 79: mod_base = OTHER; note = 2'-O-methyl modified nucleotide
  modified_base 80: mod_base = OTHER; note = 2'-O-methyl modified nucleotide
  modified_base 81: mod_base = OTHER; note = 2'-O-methyl modified nucleotide
  modified_base 82: mod_base = OTHER; note = 2'-O-methyl modified nucleotide
  modified_base 83: mod_base = OTHER; note = 2'-O-methyl modified nucleotide
  modified_base 84: mod_base = OTHER; note = 2'-O-methyl modified nucleotide
  modified_base 85: mod_base = OTHER; note = 2'-O-methyl modified nucleotide
  modified_base 86: mod_base = OTHER; note = 2'-O-methyl modified nucleotide
  modified_base 87: mod_base = OTHER; note = 2'-O-methyl modified nucleotide
  modified_base 88: mod_base = OTHER; note = 2'-O-methyl modified nucleotide
  modified_base 89: mod_base = OTHER; note = 2'-O-methyl modified nucleotide
  modified_base 90: mod_base = OTHER; note = 2'-O-methyl modified nucleotide
  modified_base 91: mod_base = OTHER; note = 2'-O-methyl modified nucleotide
  modified_base 92: mod_base = OTHER; note = 2'-O-methyl modified nucleotide
  modified_base 93: mod_base = OTHER; note = 2'-O-methyl modified nucleotide
  modified_base 94: mod_base = OTHER; note = 2'-O-methyl modified nucleotide
  modified_base 95: mod_base = OTHER; note = 2'-O-methyl modified nucleotide
  modified_base 96: mod_base = OTHER; note = 2'-O-methyl modified nucleotide
  modified_base 97: mod_base = OTHER; note = 2'-O-methyl modified nucleotide with phosphorothioate linkage
  modified_base 98: mod_base = OTHER; note = 2'-O-methyl modified nucleotide with phosphorothioate linkage
  modified_base 99: mod_base = OTHER; note = 2'-O-methyl modified nucleotide with phosphorothioate linkage
  modified_base 100: mod_base = OTHER; note = 2'-O-methyl modified nucleotide
  misc_difference 97..100: note = This region may encompass 0-4 nucleotides

SEQ ID NO: 2489 - RNA, 100 nt, synthetic construct; identical to SEQ ID NO: 1489
  source 1..100: mol_type = other RNA
  modified_base 1: mod_base = OTHER; note = 2'-O-methyl modified nucleotide with phosphorothioate linkage
  modified_base 2: mod_base = OTHER; note = 2'-O-methyl modified nucleotide with phosphorothioate linkage
  modified_base 3: mod_base = OTHER; note = 2'-O-methyl modified nucleotide with phosphorothioate linkage
  modified_base 29: mod_base = OTHER; note = 2'-O-methyl modified nucleotide
  modified_base 30: mod_base = OTHER; note = 2'-O-methyl modified nucleotide
  modified_base 31: mod_base = OTHER; note = 2'-O-methyl modified nucleotide
  modified_base 32: mod_base = OTHER; note = 2'-O-methyl modified nucleotide
  modified_base 33: mod_base = OTHER; note = 2'-O-methyl modified nucleotide
  modified_base 34: mod_base = OTHER; note = 2'-O-methyl modified nucleotide
  modified_base 35: mod_base = OTHER; note = 2'-O-methyl modified nucleotide
  modified_base 36: mod_base = OTHER; note = 2'-O-methyl modified nucleotide
  modified_base 37: mod_base = OTHER; note = 2'-O-methyl modified nucleotide
  modified_base 38: mod_base = OTHER; note = 2'-O-methyl modified nucleotide
  modified_base 39: mod_base = OTHER; note = 2'-O-methyl modified nucleotide
  modified_base 40: mod_base = OTHER; note = 2'-O-methyl modified nucleotide
  modified_base 69: mod_base = OTHER; note = 2'-O-methyl modified nucleotide
  modified_base 70: mod_base = OTHER; note = 2'-O-methyl modified nucleotide
  modified_base 71: mod_base = OTHER; note = 2'-O-methyl modified nucleotide
  modified_base 72: mod_base = OTHER; note = 2'-O-methyl modified nucleotide
  modified_base 73: mod_base = OTHER; note = 2'-O-methyl modified nucleotide
  modified_base 74: mod_base = OTHER; note = 2'-O-methyl modified nucleotide
  modified_base 75: mod_base = OTHER; note = 2'-O-methyl modified nucleotide
  modified_base 76: mod_base = OTHER; note = 2'-O-methyl modified nucleotide
  modified_base 77: mod_base = OTHER; note = 2'-O-methyl modified nucleotide
  modified_base 78: mod_base = OTHER; note = 2'-O-methyl modified nucleotide
  modified_base 79: mod_base = OTHER; note = 2'-O-methyl modified nucleotide
  modified_base 80: mod_base = OTHER; note = 2'-O-methyl modified nucleotide
  modified_base 81: mod_base = OTHER; note = 2'-O-methyl modified nucleotide
  modified_base 82: mod_base = OTHER; note = 2'-O-methyl modified nucleotide
  modified_base 83: mod_base = OTHER; note = 2'-O-methyl modified nucleotide
  modified_base 84: mod_base = OTHER; note = 2'-O-methyl modified nucleotide
  modified_base 85: mod_base = OTHER; note = 2'-O-methyl modified nucleotide
  modified_base 86: mod_base = OTHER; note = 2'-O-methyl modified nucleotide
  modified_base 87: mod_base = OTHER; note = 2'-O-methyl modified nucleotide
  modified_base 88: mod_base = OTHER; note = 2'-O-methyl modified nucleotide
  modified_base 89: mod_base = OTHER; note = 2'-O-methyl modified nucleotide
  modified_base 90: mod_base = OTHER; note = 2'-O-methyl modified nucleotide
  modified_base 91: mod_base = OTHER; note = 2'-O-methyl modified nucleotide
  modified_base 92: mod_base = OTHER; note = 2'-O-methyl modified nucleotide
  modified_base 93: mod_base = OTHER; note = 2'-O-methyl modified nucleotide
  modified_base 94: mod_base = OTHER; note = 2'-O-methyl modified nucleotide
  modified_base 95: mod_base = OTHER; note = 2'-O-methyl modified nucleotide
  modified_base 96: mod_base = OTHER; note = 2'-O-methyl modified nucleotide
  modified_base 97: mod_base = OTHER; note = 2'-O-methyl modified nucleotide with phosphorothioate linkage
  modified_base 98: mod_base = OTHER; note = 2'-O-methyl modified nucleotide with phosphorothioate linkage
  modified_base 99: mod_base = OTHER; note = 2'-O-methyl modified nucleotide with phosphorothioate linkage
  modified_base 100: mod_base = OTHER; note = 2'-O-methyl modified nucleotide
  misc_difference 97..100: note = This region may encompass 0-4 nucleotides

SEQ ID NO: 2490 - RNA, 100 nt, synthetic construct; identical to SEQ ID NO: 1490
  source 1..100: mol_type = other RNA
  modified_base 1: mod_base = OTHER; note = 2'-O-methyl modified nucleotide with phosphorothioate linkage
  modified_base 2: mod_base = OTHER; note = 2'-O-methyl modified nucleotide with phosphorothioate linkage
  modified_base 3: mod_base = OTHER; note = 2'-O-methyl modified nucleotide with phosphorothioate linkage
  modified_base 29: mod_base = OTHER; note = 2'-O-methyl modified nucleotide
  modified_base 30: mod_base = OTHER; note = 2'-O-methyl modified nucleotide
  modified_base 31: mod_base = OTHER; note = 2'-O-methyl modified nucleotide
  modified_base 32: mod_base = OTHER; note = 2'-O-methyl modified nucleotide
  modified_base 33: mod_base = OTHER; note = 2'-O-methyl modified nucleotide
  modified_base 34: mod_base = OTHER; note = 2'-O-methyl modified nucleotide
  modified_base 35: mod_base = OTHER; note = 2'-O-methyl modified nucleotide
  modified_base 36: mod_base = OTHER; note = 2'-O-methyl modified nucleotide
  modified_base 37: mod_base = OTHER; note = 2'-O-methyl modified nucleotide
  modified_base 38: mod_base = OTHER; note = 2'-O-methyl modified nucleotide
  modified_base 39: mod_base = OTHER; note = 2'-O-methyl modified nucleotide
  modified_base 40: mod_base = OTHER; note = 2'-O-methyl modified nucleotide
  modified_base 69: mod_base = OTHER; note = 2'-O-methyl modified nucleotide
  modified_base 70: mod_base = OTHER; note = 2'-O-methyl modified nucleotide
  modified_base 71: mod_base = OTHER; note = 2'-O-methyl modified nucleotide
  modified_base 72: mod_base = OTHER; note = 2'-O-methyl modified nucleotide
  modified_base 73: mod_base = OTHER; note = 2'-O-methyl modified nucleotide
  modified_base 74: mod_base = OTHER; note = 2'-O-methyl modified nucleotide
  modified_base 75: mod_base = OTHER; note = 2'-O-methyl modified nucleotide
  modified_base 76: mod_base = OTHER; note = 2'-O-methyl modified nucleotide
  modified_base 77: mod_base = OTHER; note = 2'-O-methyl modified nucleotide
  modified_base 78: mod_base = OTHER; note = 2'-O-methyl modified nucleotide
  modified_base 79: mod_base = OTHER; note = 2'-O-methyl modified nucleotide
  modified_base 80: mod_base = OTHER; note = 2'-O-methyl modified nucleotide
  modified_base 81: mod_base = OTHER; note = 2'-O-methyl modified nucleotide
  modified_base 82: mod_base = OTHER; note = 2'-O-methyl modified nucleotide
  modified_base 83: mod_base = OTHER; note = 2'-O-methyl modified nucleotide
  modified_base 84: mod_base = OTHER; note = 2'-O-methyl modified nucleotide
  modified_base 85: mod_base = OTHER; note = 2'-O-methyl modified nucleotide
  modified_base 86: mod_base = OTHER; note = 2'-O-methyl modified nucleotide
  modified_base 87: mod_base = OTHER; note = 2'-O-methyl modified nucleotide
  modified_base 88: mod_base = OTHER; note = 2'-O-methyl modified nucleotide
  modified_base 89: mod_base = OTHER; note = 2'-O-methyl modified nucleotide
  modified_base 90: mod_base = OTHER; note = 2'-O-methyl modified nucleotide
  modified_base 91: mod_base = OTHER; note = 2'-O-methyl modified nucleotide
  modified_base 92: mod_base = OTHER; note = 2'-O-methyl modified nucleotide
  modified_base 93: mod_base = OTHER; note = 2'-O-methyl modified nucleotide
  modified_base 94: mod_base = OTHER; note = 2'-O-methyl modified nucleotide
  modified_base 95: mod_base = OTHER; note = 2'-O-methyl modified nucleotide
  modified_base 96: mod_base = OTHER; note = 2'-O-methyl modified nucleotide
  modified_base 97: mod_base = OTHER; note = 2'-O-methyl modified nucleotide with phosphorothioate linkage
  modified_base 98: mod_base = OTHER; note = 2'-O-methyl modified nucleotide with phosphorothioate linkage
  modified_base 99: mod_base = OTHER; note = 2'-O-methyl modified nucleotide with phosphorothioate linkage
  modified_base 100: mod_base = OTHER; note = 2'-O-methyl modified nucleotide
  misc_difference 97..100: note = This region may encompass 0-4 nucleotides

SEQ ID NO: 2491 - RNA, 100 nt, synthetic construct; identical to SEQ ID NO: 1491
  source 1..100: mol_type = other RNA
  modified_base 1: mod_base = OTHER; note = 2'-O-methyl modified nucleotide with phosphorothioate linkage
  modified_base 2: mod_base = OTHER; note = 2'-O-methyl modified nucleotide with phosphorothioate linkage
  modified_base 3: mod_base = OTHER; note = 2'-O-methyl modified nucleotide with phosphorothioate linkage
  modified_base 29: mod_base = OTHER; note = 2'-O-methyl modified nucleotide
  modified_base 30: mod_base = OTHER; note = 2'-O-methyl modified nucleotide
  modified_base 31: mod_base = OTHER; note = 2'-O-methyl modified nucleotide
  modified_base 32: mod_base = OTHER; note = 2'-O-methyl modified nucleotide
  modified_base 33: mod_base = OTHER; note = 2'-O-methyl modified nucleotide
  modified_base 34: mod_base = OTHER; note = 2'-O-methyl modified nucleotide
  modified_base 35: mod_base = OTHER; note = 2'-O-methyl modified nucleotide
  modified_base 36: mod_base = OTHER; note = 2'-O-methyl modified nucleotide
  modified_base 37: mod_base = OTHER; note = 2'-O-methyl modified nucleotide
  modified_base 38: mod_base = OTHER; note = 2'-O-methyl modified nucleotide
  modified_base 39: mod_base = OTHER; note = 2'-O-methyl modified nucleotide
  modified_base 40: mod_base = OTHER; note = 2'-O-methyl modified nucleotide
  modified_base 69: mod_base = OTHER; note = 2'-O-methyl modified nucleotide
  modified_base 70: mod_base = OTHER; note = 2'-O-methyl modified nucleotide
  modified_base 71: mod_base = OTHER; note = 2'-O-methyl modified nucleotide
  modified_base 72: mod_base = OTHER; note = 2'-O-methyl modified nucleotide
  modified_base 73: mod_base = OTHER; note = 2'-O-methyl modified nucleotide
  modified_base 74: mod_base = OTHER; note = 2'-O-methyl modified nucleotide
  modified_base 75: mod_base = OTHER; note = 2'-O-methyl modified nucleotide
  modified_base 76: mod_base = OTHER; note = 2'-O-methyl modified nucleotide
  modified_base 77: mod_base = OTHER; note = 2'-O-methyl modified nucleotide
  modified_base 78: mod_base = OTHER; note = 2'-O-methyl modified nucleotide
  modified_base 79: mod_base = OTHER; note = 2'-O-methyl modified nucleotide
  modified_base 80: mod_base = OTHER; note = 2'-O-methyl modified nucleotide
  modified_base 81: mod_base = OTHER; note = 2'-O-methyl modified nucleotide
  modified_base 82: mod_base = OTHER; note = 2'-O-methyl modified nucleotide
  modified_base 83: mod_base = OTHER; note = 2'-O-methyl modified nucleotide
  modified_base 84: mod_base = OTHER; note = 2'-O-methyl modified nucleotide
  modified_base 85: mod_base = OTHER; note = 2'-O-methyl modified nucleotide
  modified_base 86: mod_base = OTHER; note = 2'-O-methyl modified nucleotide
  modified_base 87: mod_base = OTHER; note = 2'-O-methyl modified nucleotide
  modified_base 88: mod_base = OTHER; note = 2'-O-methyl modified nucleotide
  modified_base 89: mod_base = OTHER; note = 2'-O-methyl modified nucleotide
  modified_base 90: mod_base = OTHER; note = 2'-O-methyl modified nucleotide
  modified_base 91: mod_base = OTHER; note = 2'-O-methyl modified nucleotide
  modified_base 92: mod_base = OTHER; note = 2'-O-methyl modified nucleotide
  modified_base 93: mod_base = OTHER; note = 2'-O-methyl modified nucleotide
  modified_base 94: mod_base = OTHER; note = 2'-O-methyl modified nucleotide
  modified_base 95: mod_base = OTHER; note = 2'-O-methyl modified nucleotide
  modified_base 96: mod_base = OTHER; note = 2'-O-methyl modified nucleotide
  modified_base 97: mod_base = OTHER; note = 2'-O-methyl modified nucleotide with phosphorothioate linkage
  modified_base 98: mod_base = OTHER; note = 2'-O-methyl modified nucleotide with phosphorothioate linkage
  modified_base 99: mod_base = OTHER; note = 2'-O-methyl modified nucleotide with phosphorothioate linkage
  modified_base 100: mod_base = OTHER; note = 2'-O-methyl modified nucleotide
  misc_difference 97..100: note = This region may encompass 0-4 nucleotides

SEQ ID NO: 2492 - RNA, 100 nt, synthetic construct; identical to SEQ ID NO: 1492
  source 1..100: mol_type = other RNA
  modified_base 1: mod_base = OTHER; note = 2'-O-methyl modified nucleotide with phosphorothioate linkage
  modified_base 2: mod_base = OTHER; note = 2'-O-methyl modified nucleotide with phosphorothioate linkage
  modified_base 3: mod_base = OTHER; note = 2'-O-methyl modified nucleotide with phosphorothioate linkage
  modified_base 29: mod_base = OTHER; note = 2'-O-methyl modified nucleotide
  modified_base 30: mod_base = OTHER; note = 2'-O-methyl modified nucleotide
  modified_base 31: mod_base = OTHER; note = 2'-O-methyl modified nucleotide
  modified_base 32: mod_base = OTHER; note = 2'-O-methyl modified nucleotide
  modified_base 33: mod_base = OTHER; note = 2'-O-methyl modified nucleotide
  modified_base 34: mod_base = OTHER; note = 2'-O-methyl modified nucleotide
  modified_base 35: mod_base = OTHER; note = 2'-O-methyl modified nucleotide
  modified_base 36: mod_base = OTHER; note = 2'-O-methyl modified nucleotide
  modified_base 37: mod_base = OTHER; note = 2'-O-methyl modified nucleotide
  modified_base 38: mod_base = OTHER; note = 2'-O-methyl modified nucleotide
  modified_base 39: mod_base = OTHER; note = 2'-O-methyl modified nucleotide
  modified_base 40: mod_base = OTHER; note = 2'-O-methyl modified nucleotide
  modified_base 69: mod_base = OTHER; note = 2'-O-methyl modified nucleotide
  modified_base 70: mod_base = OTHER; note = 2'-O-methyl modified nucleotide
  modified_base 71: mod_base = OTHER; note = 2'-O-methyl modified nucleotide
  modified_base 72: mod_base = OTHER; note = 2'-O-methyl modified nucleotide
  modified_base 73: mod_base = OTHER; note = 2'-O-methyl modified nucleotide
  modified_base 74: mod_base = OTHER; note = 2'-O-methyl modified nucleotide
  modified_base 75: mod_base = OTHER; note = 2'-O-methyl modified nucleotide
  modified_base 76: mod_base = OTHER; note = 2'-O-methyl modified nucleotide
  modified_base 77: mod_base = OTHER; note = 2'-O-methyl modified nucleotide
  modified_base 78: mod_base = OTHER; note = 2'-O-methyl modified nucleotide
  modified_base 79: mod_base = OTHER; note = 2'-O-methyl modified nucleotide
  modified_base 80: mod_base = OTHER; note = 2'-O-methyl modified nucleotide
  modified_base 81: mod_base = OTHER; note = 2'-O-methyl modified nucleotide
  modified_base 82: mod_base = OTHER; note = 2'-O-methyl modified nucleotide
  modified_base 83: mod_base = OTHER; note = 2'-O-methyl modified nucleotide
  modified_base 84: mod_base = OTHER; note = 2'-O-methyl modified nucleotide
  modified_base 85: mod_base = OTHER; note = 2'-O-methyl modified nucleotide
  modified_base 86: mod_base = OTHER; note = 2'-O-methyl modified nucleotide
  modified_base 87: mod_base = OTHER; note = 2'-O-methyl modified nucleotide
  modified_base 88: mod_base = OTHER; note = 2'-O-methyl modified nucleotide
  modified_base 89: mod_base = OTHER; note = 2'-O-methyl modified nucleotide
  modified_base 90: mod_base = OTHER; note = 2'-O-methyl modified nucleotide
  modified_base 91: mod_base = OTHER; note = 2'-O-methyl modified nucleotide
  modified_base 92: mod_base = OTHER; note = 2'-O-methyl modified nucleotide
  modified_base 93: mod_base = OTHER; note = 2'-O-methyl modified nucleotide
  modified_base 94: mod_base = OTHER; note = 2'-O-methyl modified nucleotide
  modified_base 95: mod_base = OTHER; note = 2'-O-methyl modified nucleotide
  modified_base 96: mod_base = OTHER; note = 2'-O-methyl modified nucleotide
  modified_base 97: mod_base = OTHER; note = 2'-O-methyl modified nucleotide with phosphorothioate linkage
  modified_base 98: mod_base = OTHER; note = 2'-O-methyl modified nucleotide with phosphorothioate linkage
  modified_base 99: mod_base = OTHER; note = 2'-O-methyl modified nucleotide with phosphorothioate linkage
  modified_base 100: mod_base = OTHER; note = 2'-O-methyl modified nucleotide
  misc_difference 97..100: note = This region may encompass 0-4 nucleotides

SEQ ID NO: 2493 - RNA, 100 nt, synthetic construct; identical to SEQ ID NO: 1493
  source 1..100: mol_type = other RNA
  modified_base 1: mod_base = OTHER; note = 2'-O-methyl modified nucleotide with phosphorothioate linkage
  modified_base 2: mod_base = OTHER; note = 2'-O-methyl modified nucleotide with phosphorothioate linkage
  modified_base 3: mod_base = OTHER; note = 2'-O-methyl modified nucleotide with phosphorothioate linkage
  modified_base 29: mod_base = OTHER; note = 2'-O-methyl modified nucleotide
  modified_base 30: mod_base = OTHER; note = 2'-O-methyl modified nucleotide
  modified_base 31: mod_base = OTHER; note = 2'-O-methyl modified nucleotide
  modified_base 32: mod_base = OTHER; note = 2'-O-methyl modified nucleotide
  modified_base 33: mod_base = OTHER; note = 2'-O-methyl modified nucleotide
  modified_base 34: mod_base = OTHER; note = 2'-O-methyl modified nucleotide
  modified_base 35: mod_base = OTHER; note = 2'-O-methyl modified nucleotide
  modified_base 36: mod_base = OTHER; note = 2'-O-methyl modified nucleotide
  modified_base 37: mod_base = OTHER; note = 2'-O-methyl modified nucleotide
  modified_base 38: mod_base = OTHER; note = 2'-O-methyl modified nucleotide
  modified_base 39: mod_base = OTHER; note = 2'-O-methyl modified nucleotide
  modified_base 40: mod_base = OTHER; note = 2'-O-methyl modified nucleotide
  modified_base 69: mod_base = OTHER; note = 2'-O-methyl modified nucleotide
  modified_base 70: mod_base = OTHER; note = 2'-O-methyl modified nucleotide
  modified_base 71: mod_base = OTHER; note = 2'-O-methyl modified nucleotide
  modified_base 72: mod_base = OTHER; note = 2'-O-methyl modified nucleotide
  modified_base 73: mod_base = OTHER; note = 2'-O-methyl modified nucleotide
  modified_base 74: mod_base = OTHER; note = 2'-O-methyl modified nucleotide
  modified_base 75: mod_base = OTHER; note = 2'-O-methyl modified nucleotide
  modified_base 76: mod_base = OTHER; note = 2'-O-methyl modified nucleotide
  modified_base 77: mod_base = OTHER; note = 2'-O-methyl modified nucleotide
  modified_base 78: mod_base = OTHER; note = 2'-O-methyl modified nucleotide
  modified_base 79: mod_base = OTHER; note = 2'-O-methyl modified nucleotide
  modified_base 80: mod_base = OTHER; note = 2'-O-methyl modified nucleotide
  modified_base 81: mod_base = OTHER; note = 2'-O-methyl modified nucleotide
  modified_base 82: mod_base = OTHER; note = 2'-O-methyl modified nucleotide
  modified_base 83: mod_base = OTHER; note = 2'-O-methyl modified nucleotide
  modified_base 84: mod_base = OTHER; note = 2'-O-methyl modified nucleotide
  modified_base 85: mod_base = OTHER; note = 2'-O-methyl modified nucleotide
  modified_base 86: mod_base = OTHER; note = 2'-O-methyl modified nucleotide
  modified_base 87: mod_base = OTHER; note = 2'-O-methyl modified nucleotide
  modified_base 88: mod_base = OTHER; note = 2'-O-methyl modified nucleotide
  modified_base 89: mod_base = OTHER; note = 2'-O-methyl modified nucleotide
  modified_base 90: mod_base = OTHER; note = 2'-O-methyl modified nucleotide
  modified_base 91: mod_base = OTHER; note = 2'-O-methyl modified nucleotide
  modified_base 92: mod_base = OTHER; note = 2'-O-methyl modified nucleotide
  modified_base 93: mod_base = OTHER; note = 2'-O-methyl modified nucleotide
  modified_base 94: mod_base = OTHER; note = 2'-O-methyl modified nucleotide
  modified_base 95: mod_base = OTHER; note = 2'-O-methyl modified nucleotide
  modified_base 96: mod_base = OTHER; note = 2'-O-methyl modified nucleotide
  modified_base 97: mod_base = OTHER; note = 2'-O-methyl modified nucleotide with phosphorothioate linkage
  modified_base 98: mod_base = OTHER; note = 2'-O-methyl modified nucleotide with phosphorothioate linkage
  modified_base 99: mod_base = OTHER; note = 2'-O-methyl modified nucleotide with phosphorothioate linkage
  modified_base 100: mod_base = OTHER; note = 2'-O-methyl modified nucleotide
  misc_difference 97..100: note = This region may encompass 0-4 nucleotides

SEQ ID NO: 2494 - RNA, 100 nt, synthetic construct; identical to SEQ ID NO: 1494
  source 1..100: mol_type = other RNA
  modified_base 1: mod_base = OTHER; note = 2'-O-methyl modified nucleotide with phosphorothioate linkage
  modified_base 2: mod_base = OTHER; note = 2'-O-methyl modified nucleotide with phosphorothioate linkage
  modified_base 3: mod_base = OTHER; note = 2'-O-methyl modified nucleotide with phosphorothioate linkage
  modified_base 29: mod_base = OTHER; note = 2'-O-methyl modified nucleotide
  modified_base 30: mod_base = OTHER; note = 2'-O-methyl modified nucleotide
  modified_base 31: mod_base = OTHER; note = 2'-O-methyl modified nucleotide
  modified_base 32: mod_base = OTHER; note = 2'-O-methyl modified nucleotide
  modified_base 33: mod_base = OTHER; note = 2'-O-methyl modified nucleotide
  modified_base 34: mod_base = OTHER; note = 2'-O-methyl modified nucleotide
  modified_base 35: mod_base = OTHER; note = 2'-O-methyl modified nucleotide
  modified_base 36: mod_base = OTHER; note = 2'-O-methyl modified nucleotide
  modified_base 37: mod_base = OTHER; note = 2'-O-methyl modified nucleotide
  modified_base 38: mod_base = OTHER; note = 2'-O-methyl modified nucleotide
  modified_base 39: mod_base = OTHER; note = 2'-O-methyl modified nucleotide
  modified_base 40: mod_base = OTHER; note = 2'-O-methyl modified nucleotide
  modified_base 69: mod_base = OTHER; note = 2'-O-methyl modified nucleotide
  modified_base 70: mod_base = OTHER; note = 2'-O-methyl modified nucleotide
  modified_base 71: mod_base = OTHER; note = 2'-O-methyl modified nucleotide
  modified_base 72: mod_base = OTHER; note = 2'-O-methyl modified nucleotide
  modified_base 73: mod_base = OTHER; note = 2'-O-methyl modified nucleotide
  modified_base 74: mod_base = OTHER; note = 2'-O-methyl modified nucleotide
  modified_base 75: mod_base = OTHER; note = 2'-O-methyl modified nucleotide
  modified_base 76: mod_base = OTHER; note = 2'-O-methyl modified nucleotide
  modified_base 77: mod_base = OTHER; note = 2'-O-methyl modified nucleotide
  modified_base 78: mod_base = OTHER; note = 2'-O-methyl modified nucleotide
  modified_base 79: mod_base = OTHER; note = 2'-O-methyl modified nucleotide
  modified_base 80: mod_base = OTHER; note = 2'-O-methyl modified nucleotide
  modified_base 81: mod_base = OTHER; note = 2'-O-methyl modified nucleotide
  modified_base 82: mod_base = OTHER; note = 2'-O-methyl modified nucleotide
  modified_base 83: mod_base = OTHER; note = 2'-O-methyl modified nucleotide
  modified_base 84: mod_base = OTHER; note = 2'-O-methyl modified nucleotide
  modified_base 85: mod_base = OTHER; note = 2'-O-methyl modified nucleotide
  modified_base 86: mod_base = OTHER; note = 2'-O-methyl modified nucleotide
  modified_base 87: mod_base = OTHER; note = 2'-O-methyl modified nucleotide
  modified_base 88: mod_base = OTHER; note = 2'-O-methyl modified nucleotide
  modified_base 89: mod_base = OTHER; note = 2'-O-methyl modified nucleotide
  modified_base 90: mod_base = OTHER; note = 2'-O-methyl modified nucleotide
  modified_base 91: mod_base = OTHER; note = 2'-O-methyl modified nucleotide
  modified_base 92: mod_base = OTHER; note = 2'-O-methyl modified nucleotide
  modified_base 93: mod_base = OTHER; note = 2'-O-methyl modified nucleotide
  modified_base 94: mod_base = OTHER; note = 2'-O-methyl modified nucleotide
  modified_base 95: mod_base = OTHER; note = 2'-O-methyl modified nucleotide
  modified_base 96: mod_base = OTHER; note = 2'-O-methyl modified nucleotide
  modified_base 97: mod_base = OTHER; note = 2'-O-methyl modified nucleotide with phosphorothioate linkage
  modified_base 98: mod_base = OTHER; note = 2'-O-methyl modified nucleotide with phosphorothioate linkage
  modified_base 99: mod_base = OTHER; note = 2'-O-methyl modified nucleotide with phosphorothioate linkage
  modified_base 100: mod_base = OTHER; note = 2'-O-methyl modified nucleotide
  misc_difference 97..100: note = This region may encompass 0-4 nucleotides

SEQ ID NO: 2495 - RNA, 100 nt, synthetic construct; identical to SEQ ID NO: 1495
  source 1..100: mol_type = other RNA
  modified_base 1: mod_base = OTHER; note = 2'-O-methyl modified nucleotide with phosphorothioate linkage
  modified_base 2: mod_base = OTHER; note = 2'-O-methyl modified nucleotide with phosphorothioate linkage
  modified_base 3: mod_base = OTHER; note = 2'-O-methyl modified nucleotide with phosphorothioate linkage
  modified_base 29: mod_base = OTHER; note = 2'-O-methyl modified nucleotide
  modified_base 30: mod_base = OTHER; note = 2'-O-methyl modified nucleotide
  modified_base 31: mod_base = OTHER; note = 2'-O-methyl modified nucleotide
  modified_base 32: mod_base = OTHER; note = 2'-O-methyl modified nucleotide
  modified_base 33: mod_base = OTHER; note = 2'-O-methyl modified nucleotide
  modified_base 34: mod_base = OTHER; note = 2'-O-methyl modified nucleotide
  modified_base 35: mod_base = OTHER; note = 2'-O-methyl modified nucleotide
  modified_base 36: mod_base = OTHER; note = 2'-O-methyl modified nucleotide
  modified_base 37: mod_base = OTHER; note = 2'-O-methyl modified nucleotide
  modified_base 38: mod_base = OTHER; note = 2'-O-methyl modified nucleotide
  modified_base 39: mod_base = OTHER; note = 2'-O-methyl modified nucleotide
  modified_base 40: mod_base = OTHER; note = 2'-O-methyl modified nucleotide
  modified_base 69: mod_base = OTHER; note = 2'-O-methyl modified nucleotide
  modified_base 70: mod_base = OTHER; note = 2'-O-methyl modified nucleotide
  modified_base 71: mod_base = OTHER; note = 2'-O-methyl modified nucleotide
  modified_base 72: mod_base = OTHER; note = 2'-O-methyl modified nucleotide
  modified_base 73: mod_base = OTHER; note = 2'-O-methyl modified nucleotide
  modified_base 74: mod_base = OTHER; note = 2'-O-methyl modified nucleotide
  modified_base 75: mod_base = OTHER; note = 2'-O-methyl modified nucleotide
  modified_base 76: mod_base = OTHER; note = 2'-O-methyl modified nucleotide
  modified_base 77: mod_base = OTHER; note = 2'-O-methyl modified nucleotide
  modified_base 78: mod_base = OTHER; note = 2'-O-methyl modified nucleotide
  modified_base 79: mod_base = OTHER; note = 2'-O-methyl modified nucleotide
  modified_base 80: mod_base = OTHER; note = 2'-O-methyl modified nucleotide
  modified_base 81: mod_base = OTHER; note = 2'-O-methyl modified nucleotide
  modified_base 82: mod_base = OTHER; note = 2'-O-methyl modified nucleotide
  modified_base 83: mod_base = OTHER; note = 2'-O-methyl modified nucleotide
  modified_base 84: mod_base = OTHER; note = 2'-O-methyl modified nucleotide
  modified_base 85: mod_base = OTHER; note = 2'-O-methyl modified nucleotide
  modified_base 86: mod_base = OTHER; note = 2'-O-methyl modified nucleotide
  modified_base 87: mod_base = OTHER; note = 2'-O-methyl modified nucleotide
  modified_base 88: mod_base = OTHER; note = 2'-O-methyl modified nucleotide
  modified_base 89: mod_base = OTHER; note = 2'-O-methyl modified nucleotide
  modified_base 90: mod_base = OTHER; note = 2'-O-methyl modified nucleotide
  modified_base 91: mod_base = OTHER; note = 2'-O-methyl modified nucleotide
  modified_base 92: mod_base = OTHER; note = 2'-O-methyl modified nucleotide
  modified_base 93: mod_base = OTHER; note = 2'-O-methyl modified nucleotide
  modified_base 94: mod_base = OTHER; note = 2'-O-methyl modified nucleotide
  modified_base 95: mod_base = OTHER; note = 2'-O-methyl modified nucleotide
  modified_base 96: mod_base = OTHER; note = 2'-O-methyl modified nucleotide
  modified_base 97: mod_base = OTHER; note = 2'-O-methyl modified nucleotide with phosphorothioate linkage
  modified_base 98: mod_base = OTHER; note = 2'-O-methyl modified nucleotide with phosphorothioate linkage
  modified_base 99: mod_base = OTHER; note = 2'-O-methyl modified nucleotide with phosphorothioate linkage
  modified_base 100: mod_base = OTHER; note = 2'-O-methyl modified nucleotide
  misc_difference 97..100: note = This region may encompass 0-4 nucleotides

SEQ ID NO: 2496 - RNA, 100 nt, synthetic construct; identical to SEQ ID NO: 1496
  source 1..100: mol_type = other RNA
  modified_base 1: mod_base = OTHER; note = 2'-O-methyl modified nucleotide with phosphorothioate linkage
  modified_base 2: mod_base = OTHER; note = 2'-O-methyl modified nucleotide with phosphorothioate linkage
  modified_base 3: mod_base = OTHER; note = 2'-O-methyl modified nucleotide with phosphorothioate linkage
  modified_base 29: mod_base = OTHER; note = 2'-O-methyl modified nucleotide
  modified_base 30: mod_base = OTHER; note = 2'-O-methyl modified nucleotide
  modified_base 31: mod_base = OTHER; note = 2'-O-methyl modified nucleotide
  modified_base 32: mod_base = OTHER; note = 2'-O-methyl modified nucleotide
  modified_base 33: mod_base = OTHER; note = 2'-O-methyl modified nucleotide
  modified_base 34: mod_base = OTHER; note = 2'-O-methyl modified nucleotide
  modified_base 35: mod_base = OTHER; note = 2'-O-methyl modified nucleotide
  modified_base 36: mod_base = OTHER; note = 2'-O-methyl modified nucleotide
  modified_base 37: mod_base = OTHER; note = 2'-O-methyl modified nucleotide
  modified_base 38: mod_base = OTHER; note = 2'-O-methyl modified nucleotide
  modified_base 39: mod_base = OTHER; note = 2'-O-methyl modified nucleotide
  modified_base 40: mod_base = OTHER; note = 2'-O-methyl modified nucleotide
  modified_base 69: mod_base = OTHER; note = 2'-O-methyl modified nucleotide
  modified_base 70: mod_base = OTHER; note = 2'-O-methyl modified nucleotide
  modified_base 71: mod_base = OTHER; note = 2'-O-methyl modified nucleotide
  modified_base 72: mod_base = OTHER; note = 2'-O-methyl modified nucleotide
  modified_base 73: mod_base = OTHER; note = 2'-O-methyl modified nucleotide
  modified_base 74: mod_base = OTHER; note = 2'-O-methyl modified nucleotide
  modified_base 75: mod_base = OTHER; note = 2'-O-methyl modified nucleotide
  modified_base 76: mod_base = OTHER; note = 2'-O-methyl modified nucleotide
  modified_base 77: mod_base = OTHER; note = 2'-O-methyl modified nucleotide
  modified_base 78: mod_base = OTHER; note = 2'-O-methyl modified nucleotide
  modified_base 79: mod_base = OTHER; note = 2'-O-methyl modified nucleotide
  modified_base 80: mod_base = OTHER; note = 2'-O-methyl modified nucleotide
  modified_base 81: mod_base = OTHER; note = 2'-O-methyl modified nucleotide
  modified_base 82: mod_base = OTHER; note = 2'-O-methyl modified nucleotide
  modified_base 83: mod_base = OTHER; note = 2'-O-methyl modified nucleotide
  modified_base 84: mod_base = OTHER; note = 2'-O-methyl modified nucleotide
  modified_base 85: mod_base = OTHER; note = 2'-O-methyl modified nucleotide
  modified_base 86: mod_base = OTHER; note = 2'-O-methyl modified nucleotide
  modified_base 87: mod_base = OTHER; note = 2'-O-methyl modified nucleotide
  modified_base 88: mod_base = OTHER; note = 2'-O-methyl modified nucleotide
  modified_base 89: mod_base = OTHER; note = 2'-O-methyl modified nucleotide
  modified_base 90: mod_base = OTHER; note = 2'-O-methyl modified nucleotide
  modified_base 91: mod_base = OTHER; note = 2'-O-methyl modified nucleotide
  modified_base 92: mod_base = OTHER; note = 2'-O-methyl modified nucleotide
  modified_base 93: mod_base = OTHER; note = 2'-O-methyl modified nucleotide
  modified_base 94: mod_base = OTHER; note = 2'-O-methyl modified nucleotide
  modified_base 95: mod_base = OTHER; note = 2'-O-methyl modified nucleotide
  modified_base 96: mod_base = OTHER; note = 2'-O-methyl modified nucleotide
  modified_base 97: mod_base = OTHER; note = 2'-O-methyl modified nucleotide with phosphorothioate linkage
  modified_base 98: mod_base = OTHER; note = 2'-O-methyl modified nucleotide with phosphorothioate linkage
  modified_base 99: mod_base = OTHER; note = 2'-O-methyl modified nucleotide with phosphorothioate linkage
  modified_base 100: mod_base = OTHER; note = 2'-O-methyl modified nucleotide
  misc_difference 97..100: note = This region may encompass 0-4 nucleotides

SEQ ID NO: 2497 - RNA, 100 nt, synthetic construct; identical to SEQ ID NO: 1497
  source 1..100: mol_type = other RNA
  modified_base 1: mod_base = OTHER; note = 2'-O-methyl modified nucleotide with phosphorothioate linkage
  modified_base 2: mod_base = OTHER; note = 2'-O-methyl modified nucleotide with phosphorothioate linkage
  modified_base 3: mod_base = OTHER; note = 2'-O-methyl modified nucleotide with phosphorothioate linkage
  modified_base 29: mod_base = OTHER; note = 2'-O-methyl modified nucleotide
  modified_base 30: mod_base = OTHER; note = 2'-O-methyl modified nucleotide
  modified_base 31: mod_base = OTHER; note = 2'-O-methyl modified nucleotide
  modified_base 32: mod_base = OTHER; note = 2'-O-methyl modified nucleotide
  modified_base 33: mod_base = OTHER; note = 2'-O-methyl modified nucleotide
  modified_base 34: mod_base = OTHER; note = 2'-O-methyl modified nucleotide
  modified_base 35: mod_base = OTHER; note = 2'-O-methyl modified nucleotide
  modified_base 36: mod_base = OTHER; note = 2'-O-methyl modified nucleotide
  modified_base 37: mod_base = OTHER; note = 2'-O-methyl modified nucleotide
  modified_base 38: mod_base = OTHER; note = 2'-O-methyl modified nucleotide
  modified_base 39: mod_base = OTHER; note = 2'-O-methyl modified nucleotide
  modified_base 40: mod_base = OTHER; note = 2'-O-methyl modified nucleotide
  modified_base 69: mod_base = OTHER; note = 2'-O-methyl modified nucleotide
  modified_base 70: mod_base = OTHER; note = 2'-O-methyl modified nucleotide
  modified_base 71: mod_base = OTHER; note = 2'-O-methyl modified nucleotide
  modified_base 72: mod_base = OTHER; note = 2'-O-methyl modified nucleotide
  modified_base 73: mod_base = OTHER; note = 2'-O-methyl modified nucleotide
  modified_base 74: mod_base = OTHER; note = 2'-O-methyl modified nucleotide
  modified_base 75: mod_base = OTHER; note = 2'-O-methyl modified nucleotide
  modified_base 76: mod_base = OTHER; note = 2'-O-methyl modified nucleotide
  modified_base 77: mod_base = OTHER; note = 2'-O-methyl modified nucleotide
  modified_base 78: mod_base = OTHER; note = 2'-O-methyl modified nucleotide
  modified_base 79: mod_base = OTHER; note = 2'-O-methyl modified nucleotide
  modified_base 80: mod_base = OTHER; note = 2'-O-methyl modified nucleotide
  modified_base 81: mod_base = OTHER; note = 2'-O-methyl modified nucleotide
  modified_base 82: mod_base = OTHER; note = 2'-O-methyl modified nucleotide
  modified_base 83: mod_base = OTHER; note = 2'-O-methyl modified nucleotide
  modified_base 84: mod_base = OTHER; note = 2'-O-methyl modified nucleotide
  modified_base 85: mod_base = OTHER; note = 2'-O-methyl modified nucleotide
  modified_base 86: mod_base = OTHER; note = 2'-O-methyl modified nucleotide
  modified_base 87: mod_base = OTHER; note = 2'-O-methyl modified nucleotide
  modified_base 88: mod_base = OTHER; note = 2'-O-methyl modified nucleotide
  modified_base 89: mod_base = OTHER; note = 2'-O-methyl modified nucleotide
  modified_base 90: mod_base = OTHER; note = 2'-O-methyl modified nucleotide
  modified_base 91: mod_base = OTHER; note = 2'-O-methyl modified nucleotide
  modified_base 92: mod_base = OTHER; note = 2'-O-methyl modified nucleotide
  modified_base 93: mod_base = OTHER; note = 2'-O-methyl modified nucleotide
  modified_base 94: mod_base = OTHER; note = 2'-O-methyl modified nucleotide
  modified_base 95: mod_base = OTHER; note = 2'-O-methyl modified nucleotide
  modified_base 96: mod_base = OTHER; note = 2'-O-methyl modified nucleotide
  modified_base 97: mod_base = OTHER; note = 2'-O-methyl modified nucleotide with phosphorothioate linkage
  modified_base 98: mod_base = OTHER; note = 2'-O-methyl modified nucleotide with phosphorothioate linkage
  modified_base 99: mod_base = OTHER; note = 2'-O-methyl modified nucleotide with phosphorothioate linkage
  modified_base 100: mod_base = OTHER; note = 2'-O-methyl modified nucleotide
  misc_difference 97..100: note = This region may encompass 0-4 nucleotides

SEQ ID NO: 2498 - RNA, 100 nt, synthetic construct; identical to SEQ ID NO: 1498
  source 1..100: mol_type = other RNA
  modified_base 1: mod_base = OTHER; note = 2'-O-methyl modified nucleotide with phosphorothioate linkage
  modified_base 2: mod_base = OTHER; note = 2'-O-methyl modified nucleotide with phosphorothioate linkage
  modified_base 3: mod_base = OTHER; note = 2'-O-methyl modified nucleotide with phosphorothioate linkage
  modified_base 29: mod_base = OTHER; note = 2'-O-methyl modified nucleotide
  modified_base 30: mod_base = OTHER; note = 2'-O-methyl modified nucleotide
  modified_base 31: mod_base = OTHER; note = 2'-O-methyl modified nucleotide
  modified_base 32: mod_base = OTHER; note = 2'-O-methyl modified nucleotide
  modified_base 33: mod_base = OTHER; note = 2'-O-methyl modified nucleotide
  modified_base 34: mod_base = OTHER; note = 2'-O-methyl modified nucleotide
  modified_base 35: mod_base = OTHER; note = 2'-O-methyl modified nucleotide
  modified_base 36: mod_base = OTHER; note = 2'-O-methyl modified nucleotide
  modified_base 37: mod_base = OTHER; note = 2'-O-methyl modified nucleotide
  modified_base 38: mod_base = OTHER; note = 2'-O-methyl modified nucleotide
  modified_base 39: mod_base = OTHER; note = 2'-O-methyl modified nucleotide
  modified_base 40: mod_base = OTHER; note = 2'-O-methyl modified nucleotide
  modified_base 69: mod_base = OTHER; note = 2'-O-methyl modified nucleotide
  modified_base 70: mod_base = OTHER; note = 2'-O-methyl modified nucleotide
  modified_base 71: mod_base = OTHER; note = 2'-O-methyl modified nucleotide
  modified_base 72: mod_base = OTHER; note = 2'-O-methyl modified nucleotide
  modified_base 73: mod_base = OTHER; note = 2'-O-methyl modified nucleotide
  modified_base 74: mod_base = OTHER; note = 2'-O-methyl modified nucleotide
  modified_base 75: mod_base = OTHER; note = 2'-O-methyl modified nucleotide
  modified_base 76: mod_base = OTHER; note = 2'-O-methyl modified nucleotide
  modified_base 77: mod_base = OTHER; note = 2'-O-methyl modified nucleotide
  modified_base 78: mod_base = OTHER; note = 2'-O-methyl modified nucleotide
  modified_base 79: mod_base = OTHER; note = 2'-O-methyl modified nucleotide
  modified_base 80: mod_base = OTHER; note = 2'-O-methyl modified nucleotide
  modified_base 81: mod_base = OTHER; note = 2'-O-methyl modified nucleotide
  modified_base 82: mod_base = OTHER; note = 2'-O-methyl modified nucleotide
  modified_base 83: mod_base = OTHER; note = 2'-O-methyl modified nucleotide
  modified_base 84: mod_base = OTHER; note = 2'-O-methyl modified nucleotide
  modified_base 85: mod_base = OTHER; note = 2'-O-methyl modified nucleotide
  modified_base 86: mod_base = OTHER; note = 2'-O-methyl modified nucleotide
  modified_base 87: mod_base = OTHER; note = 2'-O-methyl modified nucleotide
  modified_base 88: mod_base = OTHER; note = 2'-O-methyl modified nucleotide
  modified_base 89: mod_base = OTHER; note = 2'-O-methyl modified nucleotide
  modified_base 90: mod_base = OTHER; note = 2'-O-methyl modified nucleotide
  modified_base 91: mod_base = OTHER; note = 2'-O-methyl modified nucleotide
  modified_base 92: mod_base = OTHER; note = 2'-O-methyl modified nucleotide
  modified_base 93: mod_base = OTHER; note = 2'-O-methyl modified nucleotide
  modified_base 94: mod_base = OTHER; note = 2'-O-methyl modified nucleotide
  modified_base 95: mod_base = OTHER; note = 2'-O-methyl modified nucleotide
  modified_base 96: mod_base = OTHER; note = 2'-O-methyl modified nucleotide
  modified_base 97: mod_base = OTHER; note = 2'-O-methyl modified nucleotide with phosphorothioate linkage
  modified_base 98: mod_base = OTHER; note = 2'-O-methyl modified nucleotide with phosphorothioate linkage
  modified_base 99: mod_base = OTHER; note = 2'-O-methyl modified nucleotide with phosphorothioate linkage
  modified_base 100: mod_base = OTHER; note = 2'-O-methyl modified nucleotide
  misc_difference 97..100: note = This region may encompass 0-4 nucleotides

SEQ ID NO: 2499 - skipped

SEQ ID NO: 2500 - RNA, 100 nt, synthetic construct; identical to SEQ ID NO: 1500
  source 1..100: mol_type = other RNA
  modified_base 1: mod_base = OTHER; note = 2'-O-methyl modified nucleotide with phosphorothioate linkage
  modified_base 2: mod_base = OTHER; note = 2'-O-methyl modified nucleotide with phosphorothioate linkage
  modified_base 3: mod_base = OTHER; note = 2'-O-methyl modified nucleotide with phosphorothioate linkage
  modified_base 29: mod_base = OTHER; note = 2'-O-methyl modified nucleotide
  modified_base 30: mod_base = OTHER; note = 2'-O-methyl modified nucleotide
  modified_base 31: mod_base = OTHER; note = 2'-O-methyl modified nucleotide
  modified_base 32: mod_base = OTHER; note = 2'-O-methyl modified nucleotide
  modified_base 33: mod_base = OTHER; note = 2'-O-methyl modified nucleotide
  modified_base 34: mod_base = OTHER; note = 2'-O-methyl modified nucleotide
  modified_base 35: mod_base = OTHER; note = 2'-O-methyl modified nucleotide
  modified_base 36: mod_base = OTHER; note = 2'-O-methyl modified nucleotide
  modified_base 37: mod_base = OTHER; note = 2'-O-methyl modified nucleotide
  modified_base 38: mod_base = OTHER; note = 2'-O-methyl modified nucleotide
  modified_base 39: mod_base = OTHER; note = 2'-O-methyl modified nucleotide
  modified_base 40: mod_base = OTHER; note = 2'-O-methyl modified nucleotide
  modified_base 69: mod_base = OTHER; note = 2'-O-methyl modified nucleotide
  modified_base 70: mod_base = OTHER; note = 2'-O-methyl modified nucleotide
  modified_base 71: mod_base = OTHER; note = 2'-O-methyl modified nucleotide
  modified_base 72: mod_base = OTHER; note = 2'-O-methyl modified nucleotide
  modified_base 73: mod_base = OTHER; note = 2'-O-methyl modified nucleotide
  modified_base 74: mod_base = OTHER; note = 2'-O-methyl modified nucleotide
  modified_base 75: mod_base = OTHER; note = 2'-O-methyl modified nucleotide
  modified_base 76: mod_base = OTHER; note = 2'-O-methyl modified nucleotide
  modified_base 77: mod_base = OTHER; note = 2'-O-methyl modified nucleotide
  modified_base 78: mod_base = OTHER; note = 2'-O-methyl modified nucleotide
  modified_base 79: mod_base = OTHER; note = 2'-O-methyl modified nucleotide
  modified_base 80: mod_base = OTHER; note = 2'-O-methyl modified nucleotide
  modified_base 81: mod_base = OTHER; note = 2'-O-methyl modified nucleotide
  modified_base 82: mod_base = OTHER; note = 2'-O-methyl modified nucleotide
  modified_base 83: mod_base = OTHER; note = 2'-O-methyl modified nucleotide
  modified_base 84: mod_base = OTHER; note = 2'-O-methyl modified nucleotide
  modified_base 85: mod_base = OTHER; note = 2'-O-methyl modified nucleotide
  modified_base 86: mod_base = OTHER; note = 2'-O-methyl modified nucleotide
  modified_base 87: mod_base = OTHER; note = 2'-O-methyl modified nucleotide
  modified_base 88: mod_base = OTHER; note = 2'-O-methyl modified nucleotide
  modified_base 89: mod_base = OTHER; note = 2'-O-methyl modified nucleotide
  modified_base 90: mod_base = OTHER; note = 2'-O-methyl modified nucleotide
  modified_base 91: mod_base = OTHER; note = 2'-O-methyl modified nucleotide
  modified_base 92: mod_base = OTHER; note = 2'-O-methyl modified nucleotide
  modified_base 93: mod_base = OTHER; note = 2'-O-methyl modified nucleotide
  modified_base 94: mod_base = OTHER; note = 2'-O-methyl modified nucleotide
  modified_base 95: mod_base = OTHER; note = 2'-O-methyl modified nucleotide
  modified_base 96: mod_base = OTHER; note = 2'-O-methyl modified nucleotide
  modified_base 97: mod_base = OTHER; note = 2'-O-methyl modified nucleotide with phosphorothioate linkage
  modified_base 98: mod_base = OTHER; note = 2'-O-methyl modified nucleotide with phosphorothioate linkage
  modified_base 99: mod_base = OTHER; note = 2'-O-methyl modified nucleotide with phosphorothioate linkage
  modified_base 100: mod_base = OTHER; note = 2'-O-methyl modified nucleotide
  misc_difference 97..100: note = This region may encompass 0-4 nucleotides

SEQ ID NO: 2501 - RNA, 100 nt, synthetic construct; identical to SEQ ID NO: 1501
  source 1..100: mol_type = other RNA
  modified_base 1: mod_base = OTHER; note = 2'-O-methyl modified nucleotide with phosphorothioate linkage
  modified_base 2: mod_base = OTHER; note = 2'-O-methyl modified nucleotide with phosphorothioate linkage
  modified_base 3: mod_base = OTHER; note = 2'-O-methyl modified nucleotide with phosphorothioate linkage
  modified_base 29: mod_base = OTHER; note = 2'-O-methyl modified nucleotide
  modified_base 30: mod_base = OTHER; note = 2'-O-methyl modified nucleotide
  modified_base 31: mod_base = OTHER; note = 2'-O-methyl modified nucleotide
  modified_base 32: mod_base = OTHER; note = 2'-O-methyl modified nucleotide
  modified_base 33: mod_base = OTHER; note = 2'-O-methyl modified nucleotide
  modified_base 34: mod_base = OTHER; note = 2'-O-methyl modified nucleotide
  modified_base 35: mod_base = OTHER; note = 2'-O-methyl modified nucleotide
  modified_base 36: mod_base = OTHER; note = 2'-O-methyl modified nucleotide
  modified_base 37: mod_base = OTHER; note = 2'-O-methyl modified nucleotide
  modified_base 38: mod_base = OTHER; note = 2'-O-methyl modified nucleotide
  modified_base 39: mod_base = OTHER; note = 2'-O-methyl modified nucleotide
  modified_base 40: mod_base = OTHER; note = 2'-O-methyl modified nucleotide
  modified_base 69: mod_base = OTHER; note = 2'-O-methyl modified nucleotide
  modified_base 70: mod_base = OTHER; note = 2'-O-methyl modified nucleotide
  modified_base 71: mod_base = OTHER; note = 2'-O-methyl modified nucleotide
  modified_base 72: mod_base = OTHER; note = 2'-O-methyl modified nucleotide
  modified_base 73: mod_base = OTHER; note = 2'-O-methyl modified nucleotide
  modified_base 74: mod_base = OTHER; note = 2'-O-methyl modified nucleotide
  modified_base 75: mod_base = OTHER; note = 2'-O-methyl modified nucleotide
  modified_base 76: mod_base = OTHER; note = 2'-O-methyl modified nucleotide
  modified_base 77: mod_base = OTHER; note = 2'-O-methyl modified nucleotide
  modified_base 78: mod_base = OTHER; note = 2'-O-methyl modified nucleotide
  modified_base 79: mod_base = OTHER; note = 2'-O-methyl modified nucleotide
  modified_base 80: mod_base = OTHER; note = 2'-O-methyl modified nucleotide
  modified_base 81: mod_base = OTHER; note = 2'-O-methyl modified nucleotide
  modified_base 82: mod_base = OTHER; note = 2'-O-methyl modified nucleotide
  modified_base 83: mod_base = OTHER; note = 2'-O-methyl modified nucleotide
  modified_base 84: mod_base = OTHER; note = 2'-O-methyl modified nucleotide
  modified_base 85: mod_base = OTHER; note = 2'-O-methyl modified nucleotide
  modified_base 86: mod_base = OTHER; note = 2'-O-methyl modified nucleotide
  modified_base 87: mod_base = OTHER; note = 2'-O-methyl modified nucleotide
  modified_base 88: mod_base = OTHER; note = 2'-O-methyl modified nucleotide
  modified_base 89: mod_base = OTHER; note = 2'-O-methyl modified nucleotide
  modified_base 90: mod_base = OTHER; note = 2'-O-methyl modified nucleotide
  modified_base 91: mod_base = OTHER; note = 2'-O-methyl modified nucleotide
  modified_base 92: mod_base = OTHER; note = 2'-O-methyl modified nucleotide
  modified_base 93: mod_base = OTHER; note = 2'-O-methyl modified nucleotide
  modified_base 94: mod_base = OTHER; note = 2'-O-methyl modified nucleotide
  modified_base 95: mod_base = OTHER; note = 2'-O-methyl modified nucleotide
  modified_base 96: mod_base = OTHER; note = 2'-O-methyl modified nucleotide
  modified_base 97: mod_base = OTHER; note = 2'-O-methyl modified nucleotide with phosphorothioate linkage
  modified_base 98: mod_base = OTHER; note = 2'-O-methyl modified nucleotide with phosphorothioate linkage
  modified_base 99: mod_base = OTHER; note = 2'-O-methyl modified nucleotide with phosphorothioate linkage
  modified_base 100: mod_base = OTHER; note = 2'-O-methyl modified nucleotide
  misc_difference 97..100: note = This region may encompass 0-4 nucleotides

SEQ ID NO: 2502 - RNA, 100 nt, synthetic construct; identical to SEQ ID NO: 1502
  source 1..100: mol_type = other RNA
  modified_base 1: mod_base = OTHER; note = 2'-O-methyl modified nucleotide with phosphorothioate linkage
  modified_base 2: mod_base = OTHER; note = 2'-O-methyl modified nucleotide with phosphorothioate linkage
  modified_base 3: mod_base = OTHER; note = 2'-O-methyl modified nucleotide with phosphorothioate linkage
  modified_base 29: mod_base = OTHER; note = 2'-O-methyl modified nucleotide
  modified_base 30: mod_base = OTHER; note = 2'-O-methyl modified nucleotide
  modified_base 31: mod_base = OTHER; note = 2'-O-methyl modified nucleotide
  modified_base 32: mod_base = OTHER; note = 2'-O-methyl modified nucleotide
  modified_base 33: mod_base = OTHER; note = 2'-O-methyl modified nucleotide
  modified_base 34: mod_base = OTHER; note = 2'-O-methyl modified nucleotide
  modified_base 35: mod_base = OTHER; note = 2'-O-methyl modified nucleotide
  modified_base 36: mod_base = OTHER; note = 2'-O-methyl modified nucleotide
  modified_base 37: mod_base = OTHER; note = 2'-O-methyl modified nucleotide
  modified_base 38: mod_base = OTHER; note = 2'-O-methyl modified nucleotide
  modified_base 39: mod_base = OTHER; note = 2'-O-methyl modified nucleotide
  modified_base 40: mod_base = OTHER; note = 2'-O-methyl modified nucleotide
  modified_base 69: mod_base = OTHER; note = 2'-O-methyl modified nucleotide
  modified_base 70: mod_base = OTHER; note = 2'-O-methyl modified nucleotide
  modified_base 71: mod_base = OTHER; note = 2'-O-methyl modified nucleotide
  modified_base 72: mod_base = OTHER; note = 2'-O-methyl modified nucleotide
  modified_base 73: mod_base = OTHER; note = 2'-O-methyl modified nucleotide
  modified_base 74: mod_base = OTHER; note = 2'-O-methyl modified nucleotide
  modified_base 75: mod_base = OTHER; note = 2'-O-methyl modified nucleotide
  modified_base 76: mod_base = OTHER; note = 2'-O-methyl modified nucleotide
  modified_base 77: mod_base = OTHER; note = 2'-O-methyl modified nucleotide
  modified_base 78: mod_base = OTHER; note = 2'-O-methyl modified nucleotide
  modified_base 79: mod_base = OTHER; note = 2'-O-methyl modified nucleotide
  modified_base 80: mod_base = OTHER; note = 2'-O-methyl modified nucleotide
  modified_base 81: mod_base = OTHER; note = 2'-O-methyl modified nucleotide
  modified_base 82: mod_base = OTHER; note = 2'-O-methyl modified nucleotide
  modified_base 83: mod_base = OTHER; note = 2'-O-methyl modified nucleotide
  modified_base 84: mod_base = OTHER; note = 2'-O-methyl modified nucleotide
  modified_base 85: mod_base = OTHER; note = 2'-O-methyl modified nucleotide
  modified_base 86: mod_base = OTHER; note = 2'-O-methyl modified nucleotide
  modified_base 87: mod_base = OTHER; note = 2'-O-methyl modified nucleotide
  modified_base 88: mod_base = OTHER; note = 2'-O-methyl modified nucleotide
  modified_base 89: mod_base = OTHER; note = 2'-O-methyl modified nucleotide
  modified_base 90: mod_base = OTHER; note = 2'-O-methyl modified nucleotide
  modified_base 91: mod_base = OTHER; note = 2'-O-methyl modified nucleotide
  modified_base 92: mod_base = OTHER; note = 2'-O-methyl modified nucleotide
  modified_base 93: mod_base = OTHER; note = 2'-O-methyl modified nucleotide
  modified_base 94: mod_base = OTHER; note = 2'-O-methyl modified nucleotide
  modified_base 95: mod_base = OTHER; note = 2'-O-methyl modified nucleotide
  modified_base 96: mod_base = OTHER; note = 2'-O-methyl modified nucleotide
  modified_base 97: mod_base = OTHER; note = 2'-O-methyl modified nucleotide with phosphorothioate linkage
  modified_base 98: mod_base = OTHER; note = 2'-O-methyl modified nucleotide with phosphorothioate linkage
  modified_base 99: mod_base = OTHER; note = 2'-O-methyl modified nucleotide with phosphorothioate linkage
  modified_base 100: mod_base = OTHER; note = 2'-O-methyl modified nucleotide
  misc_difference 97..100: note = This region may encompass 0-4 nucleotides

SEQ ID NO: 2503 - RNA, 100 nt, synthetic construct; identical to SEQ ID NO: 1503
  source 1..100: mol_type = other RNA
  modified_base 1: mod_base = OTHER; note = 2'-O-methyl modified nucleotide with phosphorothioate linkage
  modified_base 2: mod_base = OTHER; note = 2'-O-methyl modified nucleotide with phosphorothioate linkage
  modified_base 3: mod_base = OTHER; note = 2'-O-methyl modified nucleotide with phosphorothioate linkage
  modified_base 29: mod_base = OTHER; note = 2'-O-methyl modified nucleotide
  modified_base 30: mod_base = OTHER; note = 2'-O-methyl modified nucleotide
  modified_base 31: mod_base = OTHER; note = 2'-O-methyl modified nucleotide
  modified_base 32: mod_base = OTHER; note = 2'-O-methyl modified nucleotide
  modified_base 33: mod_base = OTHER; note = 2'-O-methyl modified nucleotide
  modified_base 34: mod_base = OTHER; note = 2'-O-methyl modified nucleotide
  modified_base 35: mod_base = OTHER; note = 2'-O-methyl modified nucleotide
  modified_base 36: mod_base = OTHER; note = 2'-O-methyl modified nucleotide
  modified_base 37: mod_base = OTHER; note = 2'-O-methyl modified nucleotide
  modified_base 38: mod_base = OTHER; note = 2'-O-methyl modified nucleotide
  modified_base 39: mod_base = OTHER; note = 2'-O-methyl modified nucleotide
  modified_base 40: mod_base = OTHER; note = 2'-O-methyl modified nucleotide
  modified_base 69: mod_base = OTHER; note = 2'-O-methyl modified nucleotide
  modified_base 70: mod_base = OTHER; note = 2'-O-methyl modified nucleotide
  modified_base 71: mod_base = OTHER; note = 2'-O-methyl modified nucleotide
  modified_base 72: mod_base = OTHER; note = 2'-O-methyl modified nucleotide
  modified_base 73: mod_base = OTHER; note = 2'-O-methyl modified nucleotide
  modified_base 74: mod_base = OTHER; note = 2'-O-methyl modified nucleotide
  modified_base 75: mod_base = OTHER; note = 2'-O-methyl modified nucleotide
  modified_base 76: mod_base = OTHER; note = 2'-O-methyl modified nucleotide
  modified_base 77: mod_base = OTHER; note = 2'-O-methyl modified nucleotide
  modified_base 78: mod_base = OTHER; note = 2'-O-methyl modified nucleotide
  modified_base 79: mod_base = OTHER; note = 2'-O-methyl modified nucleotide
  modified_base 80: mod_base = OTHER; note = 2'-O-methyl modified nucleotide
  modified_base 81: mod_base = OTHER; note = 2'-O-methyl modified nucleotide
  modified_base 82: mod_base = OTHER; note = 2'-O-methyl modified nucleotide
  modified_base 83: mod_base = OTHER; note = 2'-O-methyl modified nucleotide
  modified_base 84: mod_base = OTHER; note = 2'-O-methyl modified nucleotide
  modified_base 85: mod_base = OTHER; note = 2'-O-methyl modified nucleotide
  modified_base 86: mod_base = OTHER; note = 2'-O-methyl modified nucleotide
  modified_base 87: mod_base = OTHER; note = 2'-O-methyl modified nucleotide
  modified_base 88: mod_base = OTHER; note = 2'-O-methyl modified nucleotide
  modified_base 89: mod_base = OTHER; note = 2'-O-methyl modified nucleotide
  modified_base 90: mod_base = OTHER; note = 2'-O-methyl modified nucleotide
  modified_base 91: mod_base = OTHER; note = 2'-O-methyl modified nucleotide
  modified_base 92: mod_base = OTHER; note = 2'-O-methyl modified nucleotide
  modified_base 93: mod_base = OTHER; note = 2'-O-methyl modified nucleotide
  modified_base 94: mod_base = OTHER; note = 2'-O-methyl modified nucleotide
  modified_base 95: mod_base = OTHER; note = 2'-O-methyl modified nucleotide
  modified_base 96: mod_base = OTHER; note = 2'-O-methyl modified nucleotide
  modified_base 97: mod_base = OTHER; note = 2'-O-methyl modified nucleotide with phosphorothioate linkage
  modified_base 98: mod_base = OTHER; note = 2'-O-methyl modified nucleotide with phosphorothioate linkage
  modified_base 99: mod_base = OTHER; note = 2'-O-methyl modified nucleotide with phosphorothioate linkage
  modified_base 100: mod_base = OTHER; note = 2'-O-methyl modified nucleotide
  misc_difference 97..100: note = This region may encompass 0-4 nucleotides

SEQ ID NO: 2504 - RNA, 100 nt, synthetic construct; identical to SEQ ID NO: 1504
  source 1..100: mol_type = other RNA
  modified_base 1: mod_base = OTHER; note = 2'-O-methyl modified nucleotide with phosphorothioate linkage
  modified_base 2: mod_base = OTHER; note = 2'-O-methyl modified nucleotide with phosphorothioate linkage
  modified_base 3: mod_base = OTHER; note = 2'-O-methyl modified nucleotide with phosphorothioate linkage
  modified_base 29: mod_base = OTHER; note = 2'-O-methyl modified nucleotide
  modified_base 30: mod_base = OTHER; note = 2'-O-methyl modified nucleotide
  modified_base 31: mod_base = OTHER; note = 2'-O-methyl modified nucleotide
  modified_base 32: mod_base = OTHER; note = 2'-O-methyl modified nucleotide
  modified_base 33: mod_base = OTHER; note = 2'-O-methyl modified nucleotide
  modified_base 34: mod_base = OTHER; note = 2'-O-methyl modified nucleotide
  modified_base 35: mod_base = OTHER; note = 2'-O-methyl modified nucleotide
  modified_base 36: mod_base = OTHER; note = 2'-O-methyl modified nucleotide
  modified_base 37: mod_base = OTHER; note = 2'-O-methyl modified nucleotide
  modified_base 38: mod_base = OTHER; note = 2'-O-methyl modified nucleotide
  modified_base 39: mod_base = OTHER; note = 2'-O-methyl modified nucleotide
  modified_base 40: mod_base = OTHER; note = 2'-O-methyl modified nucleotide
  modified_base 69: mod_base = OTHER; note = 2'-O-methyl modified nucleotide
  modified_base 70: mod_base = OTHER; note = 2'-O-methyl modified nucleotide
  modified_base 71: mod_base = OTHER; note = 2'-O-methyl modified nucleotide
  modified_base 72: mod_base = OTHER; note = 2'-O-methyl modified nucleotide
  modified_base 73: mod_base = OTHER; note = 2'-O-methyl modified nucleotide
  modified_base 74: mod_base = OTHER; note = 2'-O-methyl modified nucleotide
  modified_base 75: mod_base = OTHER; note = 2'-O-methyl modified nucleotide
  modified_base 76: mod_base = OTHER; note = 2'-O-methyl modified nucleotide
  modified_base 77: mod_base = OTHER; note = 2'-O-methyl modified nucleotide
  modified_base 78: mod_base = OTHER; note = 2'-O-methyl modified nucleotide
  modified_base 79: mod_base = OTHER; note = 2'-O-methyl modified nucleotide
  modified_base 80: mod_base = OTHER; note = 2'-O-methyl modified nucleotide
  modified_base 81: mod_base = OTHER; note = 2'-O-methyl modified nucleotide
  modified_base 82: mod_base = OTHER; note = 2'-O-methyl modified nucleotide
  modified_base 83: mod_base = OTHER; note = 2'-O-methyl modified nucleotide
  modified_base 84: mod_base = OTHER; note = 2'-O-methyl modified nucleotide
  modified_base 85: mod_base = OTHER; note = 2'-O-methyl modified nucleotide
  modified_base 86: mod_base = OTHER; note = 2'-O-methyl modified nucleotide
  modified_base 87: mod_base = OTHER; note = 2'-O-methyl modified nucleotide
  modified_base 88: mod_base = OTHER; note = 2'-O-methyl modified nucleotide
  modified_base 89: mod_base = OTHER; note = 2'-O-methyl modified nucleotide
  modified_base 90: mod_base = OTHER; note = 2'-O-methyl modified nucleotide
  modified_base 91: mod_base = OTHER; note = 2'-O-methyl modified nucleotide
  modified_base 92: mod_base = OTHER; note = 2'-O-methyl modified nucleotide
  modified_base 93: mod_base = OTHER; note = 2'-O-methyl modified nucleotide
  modified_base 94: mod_base = OTHER; note = 2'-O-methyl modified nucleotide
  modified_base 95: mod_base = OTHER; note = 2'-O-methyl modified nucleotide
  modified_base 96: mod_base = OTHER; note = 2'-O-methyl modified nucleotide
  modified_base 97: mod_base = OTHER; note = 2'-O-methyl modified nucleotide with phosphorothioate linkage
  modified_base 98: mod_base = OTHER; note = 2'-O-methyl modified nucleotide with phosphorothioate linkage
  modified_base 99: mod_base = OTHER; note = 2'-O-methyl modified nucleotide with phosphorothioate linkage
  modified_base 100: mod_base = OTHER; note = 2'-O-methyl modified nucleotide
  misc_difference 97..100: note = This region may encompass 0-4 nucleotides

SEQ ID NO: 2505 - RNA, 100 nt, synthetic construct; identical to SEQ ID NO: 1505
  source 1..100: mol_type = other RNA
  modified_base 1: mod_base = OTHER; note = 2'-O-methyl modified nucleotide with phosphorothioate linkage
  modified_base 2: mod_base = OTHER; note = 2'-O-methyl modified nucleotide with phosphorothioate linkage
  modified_base 3: mod_base = OTHER; note = 2'-O-methyl modified nucleotide with phosphorothioate linkage
  modified_base 29: mod_base = OTHER; note = 2'-O-methyl modified nucleotide
  modified_base 30: mod_base = OTHER; note = 2'-O-methyl modified nucleotide
  modified_base 31: mod_base = OTHER; note = 2'-O-methyl modified nucleotide
  modified_base 32: mod_base = OTHER; note = 2'-O-methyl modified nucleotide
  modified_base 33: mod_base = OTHER; note = 2'-O-methyl modified nucleotide
  modified_base 34: mod_base = OTHER; note = 2'-O-methyl modified nucleotide
  modified_base 35: mod_base = OTHER; note = 2'-O-methyl modified nucleotide
  modified_base 36: mod_base = OTHER; note = 2'-O-methyl modified nucleotide
  modified_base 37: mod_base = OTHER; note = 2'-O-methyl modified nucleotide
  modified_base 38: mod_base = OTHER; note = 2'-O-methyl modified nucleotide
  modified_base 39: mod_base = OTHER; note = 2'-O-methyl modified nucleotide
  modified_base 40: mod_base = OTHER; note = 2'-O-methyl modified nucleotide
  modified_base 69: mod_base = OTHER; note = 2'-O-methyl modified nucleotide
  modified_base 70: mod_base = OTHER; note = 2'-O-methyl modified nucleotide
  modified_base 71: mod_base = OTHER; note = 2'-O-methyl modified nucleotide
  modified_base 72: mod_base = OTHER; note = 2'-O-methyl modified nucleotide
  modified_base 73: mod_base = OTHER; note = 2'-O-methyl modified nucleotide
  modified_base 74: mod_base = OTHER; note = 2'-O-methyl modified nucleotide
  modified_base 75: mod_base = OTHER; note = 2'-O-methyl modified nucleotide
  modified_base 76: mod_base = OTHER; note = 2'-O-methyl modified nucleotide
  modified_base 77: mod_base = OTHER; note = 2'-O-methyl modified nucleotide
  modified_base 78: mod_base = OTHER; note = 2'-O-methyl modified nucleotide
  modified_base 79: mod_base = OTHER; note = 2'-O-methyl modified nucleotide
  modified_base 80: mod_base = OTHER; note = 2'-O-methyl modified nucleotide
  modified_base 81: mod_base = OTHER; note = 2'-O-methyl modified nucleotide
  modified_base 82: mod_base = OTHER; note = 2'-O-methyl modified nucleotide
  modified_base 83: mod_base = OTHER; note = 2'-O-methyl modified nucleotide
  modified_base 84: mod_base = OTHER; note = 2'-O-methyl modified nucleotide
  modified_base 85: mod_base = OTHER; note = 2'-O-methyl modified nucleotide
  modified_base 86: mod_base = OTHER; note = 2'-O-methyl modified nucleotide
  modified_base 87: mod_base = OTHER; note = 2'-O-methyl modified nucleotide
  modified_base 88: mod_base = OTHER; note = 2'-O-methyl modified nucleotide
  modified_base 89: mod_base = OTHER; note = 2'-O-methyl modified nucleotide
  modified_base 90: mod_base = OTHER; note = 2'-O-methyl modified nucleotide
  modified_base 91: mod_base = OTHER; note = 2'-O-methyl modified nucleotide
  modified_base 92: mod_base = OTHER; note = 2'-O-methyl modified nucleotide
  modified_base 93: mod_base = OTHER; note = 2'-O-methyl modified nucleotide
  modified_base 94: mod_base = OTHER; note = 2'-O-methyl modified nucleotide
  modified_base 95: mod_base = OTHER; note = 2'-O-methyl modified nucleotide
  modified_base 96: mod_base = OTHER; note = 2'-O-methyl modified nucleotide
  modified_base 97: mod_base = OTHER; note = 2'-O-methyl modified nucleotide with phosphorothioate linkage
  modified_base 98: mod_base = OTHER; note = 2'-O-methyl modified nucleotide with phosphorothioate linkage
  modified_base 99: mod_base = OTHER; note = 2'-O-methyl modified nucleotide with phosphorothioate linkage
  modified_base 100: mod_base = OTHER; note = 2'-O-methyl modified nucleotide
  misc_difference 97..100: note = This region may encompass 0-4 nucleotides

SEQ ID NO: 2506 - RNA, 100 nt, synthetic construct; identical to SEQ ID NO: 1506
  source 1..100: mol_type = other RNA
  modified_base 1: mod_base = OTHER; note = 2'-O-methyl modified nucleotide with phosphorothioate linkage
  modified_base 2: mod_base = OTHER; note = 2'-O-methyl modified nucleotide with phosphorothioate linkage
  modified_base 3: mod_base = OTHER; note = 2'-O-methyl modified nucleotide with phosphorothioate linkage
  modified_base 29: mod_base = OTHER; note = 2'-O-methyl modified nucleotide
  modified_base 30: mod_base = OTHER; note = 2'-O-methyl modified nucleotide
  modified_base 31: mod_base = OTHER; note = 2'-O-methyl modified nucleotide
  modified_base 32: mod_base = OTHER; note = 2'-O-methyl modified nucleotide
  modified_base 33: mod_base = OTHER; note = 2'-O-methyl modified nucleotide
  modified_base 34: mod_base = OTHER; note = 2'-O-methyl modified nucleotide
  modified_base 35: mod_base = OTHER; note = 2'-O-methyl modified nucleotide
  modified_base 36: mod_base = OTHER; note = 2'-O-methyl modified nucleotide
  modified_base 37: mod_base = OTHER; note = 2'-O-methyl modified nucleotide
  modified_base 38: mod_base = OTHER; note = 2'-O-methyl modified nucleotide
  modified_base 39: mod_base = OTHER; note = 2'-O-methyl modified nucleotide
  modified_base 40: mod_base = OTHER; note = 2'-O-methyl modified nucleotide
  modified_base 69: mod_base = OTHER; note = 2'-O-methyl modified nucleotide
  modified_base 70: mod_base = OTHER; note = 2'-O-methyl modified nucleotide
  modified_base 71: mod_base = OTHER; note = 2'-O-methyl modified nucleotide
  modified_base 72: mod_base = OTHER; note = 2'-O-methyl modified nucleotide
  modified_base 73: mod_base = OTHER; note = 2'-O-methyl modified nucleotide
  modified_base 74: mod_base = OTHER; note = 2'-O-methyl modified nucleotide
  modified_base 75: mod_base = OTHER; note = 2'-O-methyl modified nucleotide
  modified_base 76: mod_base = OTHER; note = 2'-O-methyl modified nucleotide
  modified_base 77: mod_base = OTHER; note = 2'-O-methyl modified nucleotide
  modified_base 78: mod_base = OTHER; note = 2'-O-methyl modified nucleotide
  modified_base 79: mod_base = OTHER; note = 2'-O-methyl modified nucleotide
  modified_base 80: mod_base = OTHER; note = 2'-O-methyl modified nucleotide
  modified_base 81: mod_base = OTHER; note = 2'-O-methyl modified nucleotide
  modified_base 82: mod_base = OTHER; note = 2'-O-methyl modified nucleotide
  modified_base 83: mod_base = OTHER; note = 2'-O-methyl modified nucleotide
  modified_base 84: mod_base = OTHER; note = 2'-O-methyl modified nucleotide
  modified_base 85: mod_base = OTHER; note = 2'-O-methyl modified nucleotide
  modified_base 86: mod_base = OTHER; note = 2'-O-methyl modified nucleotide
  modified_base 87: mod_base = OTHER; note = 2'-O-methyl modified nucleotide
  modified_base 88: mod_base = OTHER; note = 2'-O-methyl modified nucleotide
  modified_base 89: mod_base = OTHER; note = 2'-O-methyl modified nucleotide
  modified_base 90: mod_base = OTHER; note = 2'-O-methyl modified nucleotide
  modified_base 91: mod_base = OTHER; note = 2'-O-methyl modified nucleotide
  modified_base 92: mod_base = OTHER; note = 2'-O-methyl modified nucleotide
  modified_base 93: mod_base = OTHER; note = 2'-O-methyl modified nucleotide
  modified_base 94: mod_base = OTHER; note = 2'-O-methyl modified nucleotide
  modified_base 95: mod_base = OTHER; note = 2'-O-methyl modified nucleotide
  modified_base 96: mod_base = OTHER; note = 2'-O-methyl modified nucleotide
  modified_base 97: mod_base = OTHER; note = 2'-O-methyl modified nucleotide with phosphorothioate linkage
  modified_base 98: mod_base = OTHER; note = 2'-O-methyl modified nucleotide with phosphorothioate linkage
  modified_base 99: mod_base = OTHER; note = 2'-O-methyl modified nucleotide with phosphorothioate linkage
  modified_base 100: mod_base = OTHER; note = 2'-O-methyl modified nucleotide
  misc_difference 97..100: note = This region may encompass 0-4 nucleotides

SEQ ID NO: 2507 - RNA, 100 nt, synthetic construct; identical to SEQ ID NO: 1507
  source 1..100: mol_type = other RNA
  modified_base 1: mod_base = OTHER; note = 2'-O-methyl modified nucleotide with phosphorothioate linkage
  modified_base 2: mod_base = OTHER; note = 2'-O-methyl modified nucleotide with phosphorothioate linkage
  modified_base 3: mod_base = OTHER; note = 2'-O-methyl modified nucleotide with phosphorothioate linkage
  modified_base 29: mod_base = OTHER; note = 2'-O-methyl modified nucleotide
  modified_base 30: mod_base = OTHER; note = 2'-O-methyl modified nucleotide
  modified_base 31: mod_base = OTHER; note = 2'-O-methyl modified nucleotide
  modified_base 32: mod_base = OTHER; note = 2'-O-methyl modified nucleotide
  modified_base 33: mod_base = OTHER; note = 2'-O-methyl modified nucleotide
  modified_base 34: mod_base = OTHER; note = 2'-O-methyl modified nucleotide
  modified_base 35: mod_base = OTHER; note = 2'-O-methyl modified nucleotide
  modified_base 36: mod_base = OTHER; note = 2'-O-methyl modified nucleotide
  modified_base 37: mod_base = OTHER; note = 2'-O-methyl modified nucleotide
  modified_base 38: mod_base = OTHER; note = 2'-O-methyl modified nucleotide
  modified_base 39: mod_base = OTHER; note = 2'-O-methyl modified nucleotide
  modified_base 40: mod_base = OTHER; note = 2'-O-methyl modified nucleotide
  modified_base 69: mod_base = OTHER; note = 2'-O-methyl modified nucleotide
  modified_base 70: mod_base = OTHER; note = 2'-O-methyl modified nucleotide
  modified_base 71: mod_base = OTHER; note = 2'-O-methyl modified nucleotide
  modified_base 72: mod_base = OTHER; note = 2'-O-methyl modified nucleotide
  modified_base 73: mod_base = OTHER; note = 2'-O-methyl modified nucleotide
  modified_base 74: mod_base = OTHER; note = 2'-O-methyl modified nucleotide
  modified_base 75: mod_base = OTHER; note = 2'-O-methyl modified nucleotide
  modified_base 76: mod_base = OTHER; note = 2'-O-methyl modified nucleotide
  modified_base 77: mod_base = OTHER; note = 2'-O-methyl modified nucleotide
  modified_base 78: mod_base = OTHER; note = 2'-O-methyl modified nucleotide
  modified_base 79: mod_base = OTHER; note = 2'-O-methyl modified nucleotide
  modified_base 80: mod_base = OTHER; note = 2'-O-methyl modified nucleotide
  modified_base 81: mod_base = OTHER; note = 2'-O-methyl modified nucleotide
  modified_base 82: mod_base = OTHER; note = 2'-O-methyl modified nucleotide
  modified_base 83: mod_base = OTHER; note = 2'-O-methyl modified nucleotide
  modified_base 84: mod_base = OTHER; note = 2'-O-methyl modified nucleotide
  modified_base 85: mod_base = OTHER; note = 2'-O-methyl modified nucleotide
  modified_base 86: mod_base = OTHER; note = 2'-O-methyl modified nucleotide
  modified_base 87: mod_base = OTHER; note = 2'-O-methyl modified nucleotide
  modified_base 88: mod_base = OTHER; note = 2'-O-methyl modified nucleotide
  modified_base 89: mod_base = OTHER; note = 2'-O-methyl modified nucleotide
  modified_base 90: mod_base = OTHER; note = 2'-O-methyl modified nucleotide
  modified_base 91: mod_base = OTHER; note = 2'-O-methyl modified nucleotide
  modified_base 92: mod_base = OTHER; note = 2'-O-methyl modified nucleotide
  modified_base 93: mod_base = OTHER; note = 2'-O-methyl modified nucleotide
  modified_base 94: mod_base = OTHER; note = 2'-O-methyl modified nucleotide
  modified_base 95: mod_base = OTHER; note = 2'-O-methyl modified nucleotide
  modified_base 96: mod_base = OTHER; note = 2'-O-methyl modified nucleotide
  modified_base 97: mod_base = OTHER; note = 2'-O-methyl modified nucleotide with phosphorothioate linkage
  modified_base 98: mod_base = OTHER; note = 2'-O-methyl modified nucleotide with phosphorothioate linkage
  modified_base 99: mod_base = OTHER; note = 2'-O-methyl modified nucleotide with phosphorothioate linkage
  modified_base 100: mod_base = OTHER; note = 2'-O-methyl modified nucleotide
  misc_difference 97..100: note = This region may encompass 0-4 nucleotides

SEQ ID NO: 2508 - RNA, 100 nt, synthetic construct; identical to SEQ ID NO: 1508
  source 1..100: mol_type = other RNA
  modified_base 1: mod_base = OTHER; note = 2'-O-methyl modified nucleotide with phosphorothioate linkage
  modified_base 2: mod_base = OTHER; note = 2'-O-methyl modified nucleotide with phosphorothioate linkage
  modified_base 3: mod_base = OTHER; note = 2'-O-methyl modified nucleotide with phosphorothioate linkage
  modified_base 29: mod_base = OTHER; note = 2'-O-methyl modified nucleotide
  modified_base 30: mod_base = OTHER; note = 2'-O-methyl modified nucleotide
  modified_base 31: mod_base = OTHER; note = 2'-O-methyl modified nucleotide
  modified_base 32: mod_base = OTHER; note = 2'-O-methyl modified nucleotide
  modified_base 33: mod_base = OTHER; note = 2'-O-methyl modified nucleotide
  modified_base 34: mod_base = OTHER; note = 2'-O-methyl modified nucleotide
  modified_base 35: mod_base = OTHER; note = 2'-O-methyl modified nucleotide
  modified_base 36: mod_base = OTHER; note = 2'-O-methyl modified nucleotide
  modified_base 37: mod_base = OTHER; note = 2'-O-methyl modified nucleotide
  modified_base 38: mod_base = OTHER; note = 2'-O-methyl modified nucleotide
  modified_base 39: mod_base = OTHER; note = 2'-O-methyl modified nucleotide
  modified_base 40: mod_base = OTHER; note = 2'-O-methyl modified nucleotide
  modified_base 69: mod_base = OTHER; note = 2'-O-methyl modified nucleotide
  modified_base 70: mod_base = OTHER; note = 2'-O-methyl modified nucleotide
  modified_base 71: mod_base = OTHER; note = 2'-O-methyl modified nucleotide
  modified_base 72: mod_base = OTHER; note = 2'-O-methyl modified nucleotide
  modified_base 73: mod_base = OTHER; note = 2'-O-methyl modified nucleotide
  modified_base 74: mod_base = OTHER; note = 2'-O-methyl modified nucleotide
  modified_base 75: mod_base = OTHER; note = 2'-O-methyl modified nucleotide
  modified_base 76: mod_base = OTHER; note = 2'-O-methyl modified nucleotide
  modified_base 77: mod_base = OTHER; note = 2'-O-methyl modified nucleotide
  modified_base 78: mod_base = OTHER; note = 2'-O-methyl modified nucleotide
  modified_base 79: mod_base = OTHER; note = 2'-O-methyl modified nucleotide
  modified_base 80: mod_base = OTHER; note = 2'-O-methyl modified nucleotide
  modified_base 81: mod_base = OTHER; note = 2'-O-methyl modified nucleotide
  modified_base 82: mod_base = OTHER; note = 2'-O-methyl modified nucleotide
  modified_base 83: mod_base = OTHER; note = 2'-O-methyl modified nucleotide
  modified_base 84: mod_base = OTHER; note = 2'-O-methyl modified nucleotide
  modified_base 85: mod_base = OTHER; note = 2'-O-methyl modified nucleotide
  modified_base 86: mod_base = OTHER; note = 2'-O-methyl modified nucleotide
  modified_base 87: mod_base = OTHER; note = 2'-O-methyl modified nucleotide
  modified_base 88: mod_base = OTHER; note = 2'-O-methyl modified nucleotide
  modified_base 89: mod_base = OTHER; note = 2'-O-methyl modified nucleotide
  modified_base 90: mod_base = OTHER; note = 2'-O-methyl modified nucleotide
  modified_base 91: mod_base = OTHER; note = 2'-O-methyl modified nucleotide
  modified_base 92: mod_base = OTHER; note = 2'-O-methyl modified nucleotide
  modified_base 93: mod_base = OTHER; note = 2'-O-methyl modified nucleotide
  modified_base 94: mod_base = OTHER; note = 2'-O-methyl modified nucleotide
  modified_base 95: mod_base = OTHER; note = 2'-O-methyl modified nucleotide
  modified_base 96: mod_base = OTHER; note = 2'-O-methyl modified nucleotide
  modified_base 97: mod_base = OTHER; note = 2'-O-methyl modified nucleotide with phosphorothioate linkage
  modified_base 98: mod_base = OTHER; note = 2'-O-methyl modified nucleotide with phosphorothioate linkage
  modified_base 99: mod_base = OTHER; note = 2'-O-methyl modified nucleotide with phosphorothioate linkage
  modified_base 100: mod_base = OTHER; note = 2'-O-methyl modified nucleotide
  misc_difference 97..100: note = This region may encompass 0-4 nucleotides

SEQ ID NO: 2509 - RNA, 100 nt, synthetic construct; identical to SEQ ID NO: 1509
  source 1..100: mol_type = other RNA
  modified_base 1: mod_base = OTHER; note = 2'-O-methyl modified nucleotide with phosphorothioate linkage
  modified_base 2: mod_base = OTHER; note = 2'-O-methyl modified nucleotide with phosphorothioate linkage
  modified_base 3: mod_base = OTHER; note = 2'-O-methyl modified nucleotide with phosphorothioate linkage
  modified_base 29: mod_base = OTHER; note = 2'-O-methyl modified nucleotide
  modified_base 30: mod_base = OTHER; note = 2'-O-methyl modified nucleotide
  modified_base 31: mod_base = OTHER; note = 2'-O-methyl modified nucleotide
  modified_base 32: mod_base = OTHER; note = 2'-O-methyl modified nucleotide
  modified_base 33: mod_base = OTHER; note = 2'-O-methyl modified nucleotide
  modified_base 34: mod_base = OTHER; note = 2'-O-methyl modified nucleotide
  modified_base 35: mod_base = OTHER; note = 2'-O-methyl modified nucleotide
  modified_base 36: mod_base = OTHER; note = 2'-O-methyl modified nucleotide
  modified_base 37: mod_base = OTHER; note = 2'-O-methyl modified nucleotide
  modified_base 38: mod_base = OTHER; note = 2'-O-methyl modified nucleotide
  modified_base 39: mod_base = OTHER; note = 2'-O-methyl modified nucleotide
  modified_base 40: mod_base = OTHER; note = 2'-O-methyl modified nucleotide
  modified_base 69: mod_base = OTHER; note = 2'-O-methyl modified nucleotide
  modified_base 70: mod_base = OTHER; note = 2'-O-methyl modified nucleotide
  modified_base 71: mod_base = OTHER; note = 2'-O-methyl modified nucleotide
  modified_base 72: mod_base = OTHER; note = 2'-O-methyl modified nucleotide
  modified_base 73: mod_base = OTHER; note = 2'-O-methyl modified nucleotide
  modified_base 74: mod_base = OTHER; note = 2'-O-methyl modified nucleotide
  modified_base 75: mod_base = OTHER; note = 2'-O-methyl modified nucleotide
  modified_base 76: mod_base = OTHER; note = 2'-O-methyl modified nucleotide
  modified_base 77: mod_base = OTHER; note = 2'-O-methyl modified nucleotide
  modified_base 78: mod_base = OTHER; note = 2'-O-methyl modified nucleotide
  modified_base 79: mod_base = OTHER; note = 2'-O-methyl modified nucleotide
  modified_base 80: mod_base = OTHER; note = 2'-O-methyl modified nucleotide
  modified_base 81: mod_base = OTHER; note = 2'-O-methyl modified nucleotide
  modified_base 82: mod_base = OTHER; note = 2'-O-methyl modified nucleotide
  modified_base 83: mod_base = OTHER; note = 2'-O-methyl modified nucleotide
  modified_base 84: mod_base = OTHER; note = 2'-O-methyl modified nucleotide
  modified_base 85: mod_base = OTHER; note = 2'-O-methyl modified nucleotide
  modified_base 86: mod_base = OTHER; note = 2'-O-methyl modified nucleotide
  modified_base 87: mod_base = OTHER; note = 2'-O-methyl modified nucleotide
  modified_base 88: mod_base = OTHER; note = 2'-O-methyl modified nucleotide
  modified_base 89: mod_base = OTHER; note = 2'-O-methyl modified nucleotide
  modified_base 90: mod_base = OTHER; note = 2'-O-methyl modified nucleotide
  modified_base 91: mod_base = OTHER; note = 2'-O-methyl modified nucleotide
  modified_base 92: mod_base = OTHER; note = 2'-O-methyl modified nucleotide
  modified_base 93: mod_base = OTHER; note = 2'-O-methyl modified nucleotide
  modified_base 94: mod_base = OTHER; note = 2'-O-methyl modified nucleotide
  modified_base 95: mod_base = OTHER; note = 2'-O-methyl modified nucleotide
  modified_base 96: mod_base = OTHER; note = 2'-O-methyl modified nucleotide
  modified_base 97: mod_base = OTHER; note = 2'-O-methyl modified nucleotide with phosphorothioate linkage
  modified_base 98: mod_base = OTHER; note = 2'-O-methyl modified nucleotide with phosphorothioate linkage
  modified_base 99: mod_base = OTHER; note = 2'-O-methyl modified nucleotide with phosphorothioate linkage
  modified_base 100: mod_base = OTHER; note = 2'-O-methyl modified nucleotide
  misc_difference 97..100: note = This region may encompass 0-4 nucleotides

SEQ ID NO: 2510 - RNA, 100 nt, synthetic construct; identical to SEQ ID NO: 1510
  source 1..100: mol_type = other RNA
  modified_base 1: mod_base = OTHER; note = 2'-O-methyl modified nucleotide with phosphorothioate linkage
  modified_base 2: mod_base = OTHER; note = 2'-O-methyl modified nucleotide with phosphorothioate linkage
  modified_base 3: mod_base = OTHER; note = 2'-O-methyl modified nucleotide with phosphorothioate linkage
  modified_base 29: mod_base = OTHER; note = 2'-O-methyl modified nucleotide
  modified_base 30: mod_base = OTHER; note = 2'-O-methyl modified nucleotide
  modified_base 31: mod_base = OTHER; note = 2'-O-methyl modified nucleotide
  modified_base 32: mod_base = OTHER; note = 2'-O-methyl modified nucleotide
  modified_base 33: mod_base = OTHER; note = 2'-O-methyl modified nucleotide
  modified_base 34: mod_base = OTHER; note = 2'-O-methyl modified nucleotide
  modified_base 35: mod_base = OTHER; note = 2'-O-methyl modified nucleotide
  modified_base 36: mod_base = OTHER; note = 2'-O-methyl modified nucleotide
  modified_base 37: mod_base = OTHER; note = 2'-O-methyl modified nucleotide
  modified_base 38: mod_base = OTHER; note = 2'-O-methyl modified nucleotide
  modified_base 39: mod_base = OTHER; note = 2'-O-methyl modified nucleotide
  modified_base 40: mod_base = OTHER; note = 2'-O-methyl modified nucleotide
  modified_base 69: mod_base = OTHER; note = 2'-O-methyl modified nucleotide
  modified_base 70: mod_base = OTHER; note = 2'-O-methyl modified nucleotide
  modified_base 71: mod_base = OTHER; note = 2'-O-methyl modified nucleotide
  modified_base 72: mod_base = OTHER; note = 2'-O-methyl modified nucleotide
  modified_base 73: mod_base = OTHER; note = 2'-O-methyl modified nucleotide
  modified_base 74: mod_base = OTHER; note = 2'-O-methyl modified nucleotide
  modified_base 75: mod_base = OTHER; note = 2'-O-methyl modified nucleotide
  modified_base 76: mod_base = OTHER; note = 2'-O-methyl modified nucleotide
  modified_base 77: mod_base = OTHER; note = 2'-O-methyl modified nucleotide
  modified_base 78: mod_base = OTHER; note = 2'-O-methyl modified nucleotide
  modified_base 79: mod_base = OTHER; note = 2'-O-methyl modified nucleotide
  modified_base 80: mod_base = OTHER; note = 2'-O-methyl modified nucleotide
  modified_base 81: mod_base = OTHER; note = 2'-O-methyl modified nucleotide
  modified_base 82: mod_base = OTHER; note = 2'-O-methyl modified nucleotide
  modified_base 83: mod_base = OTHER; note = 2'-O-methyl modified nucleotide
  modified_base 84: mod_base = OTHER; note = 2'-O-methyl modified nucleotide
  modified_base 85: mod_base = OTHER; note = 2'-O-methyl modified nucleotide
  modified_base 86: mod_base = OTHER; note = 2'-O-methyl modified nucleotide
  modified_base 87: mod_base = OTHER; note = 2'-O-methyl modified nucleotide
  modified_base 88: mod_base = OTHER; note = 2'-O-methyl modified nucleotide
  modified_base 89: mod_base = OTHER; note = 2'-O-methyl modified nucleotide
  modified_base 90: mod_base = OTHER; note = 2'-O-methyl modified nucleotide
  modified_base 91: mod_base = OTHER; note = 2'-O-methyl modified nucleotide
  modified_base 92: mod_base = OTHER; note = 2'-O-methyl modified nucleotide
  modified_base 93: mod_base = OTHER; note = 2'-O-methyl modified nucleotide
  modified_base 94: mod_base = OTHER; note = 2'-O-methyl modified nucleotide
  modified_base 95: mod_base = OTHER; note = 2'-O-methyl modified nucleotide
  modified_base 96: mod_base = OTHER; note = 2'-O-methyl modified nucleotide
  modified_base 97: mod_base = OTHER; note = 2'-O-methyl modified nucleotide with phosphorothioate linkage
  modified_base 98: mod_base = OTHER; note = 2'-O-methyl modified nucleotide with phosphorothioate linkage
  modified_base 99: mod_base = OTHER; note = 2'-O-methyl modified nucleotide with phosphorothioate linkage
  modified_base 100: mod_base = OTHER; note = 2'-O-methyl modified nucleotide
  misc_difference 97..100: note = This region may encompass 0-4 nucleotides

SEQ ID NO: 2511 - RNA, 100 nt, synthetic construct; identical to SEQ ID NO: 1511
  source 1..100: mol_type = other RNA
  modified_base 1: mod_base = OTHER; note = 2'-O-methyl modified nucleotide with phosphorothioate linkage
  modified_base 2: mod_base = OTHER; note = 2'-O-methyl modified nucleotide with phosphorothioate linkage
  modified_base 3: mod_base = OTHER; note = 2'-O-methyl modified nucleotide with phosphorothioate linkage
  modified_base 29: mod_base = OTHER; note = 2'-O-methyl modified nucleotide
  modified_base 30: mod_base = OTHER; note = 2'-O-methyl modified nucleotide
  modified_base 31: mod_base = OTHER; note = 2'-O-methyl modified nucleotide
  modified_base 32: mod_base = OTHER; note = 2'-O-methyl modified nucleotide
  modified_base 33: mod_base = OTHER; note = 2'-O-methyl modified nucleotide
  modified_base 34: mod_base = OTHER; note = 2'-O-methyl modified nucleotide
  modified_base 35: mod_base = OTHER; note = 2'-O-methyl modified nucleotide
  modified_base 36: mod_base = OTHER; note = 2'-O-methyl modified nucleotide
  modified_base 37: mod_base = OTHER; note = 2'-O-methyl modified nucleotide
  modified_base 38: mod_base = OTHER; note = 2'-O-methyl modified nucleotide
  modified_base 39: mod_base = OTHER; note = 2'-O-methyl modified nucleotide
  modified_base 40: mod_base = OTHER; note = 2'-O-methyl modified nucleotide
  modified_base 69: mod_base = OTHER; note = 2'-O-methyl modified nucleotide
  modified_base 70: mod_base = OTHER; note = 2'-O-methyl modified nucleotide
  modified_base 71: mod_base = OTHER; note = 2'-O-methyl modified nucleotide
  modified_base 72: mod_base = OTHER; note = 2'-O-methyl modified nucleotide
  modified_base 73: mod_base = OTHER; note = 2'-O-methyl modified nucleotide
  modified_base 74: mod_base = OTHER; note = 2'-O-methyl modified nucleotide
  modified_base 75: mod_base = OTHER; note = 2'-O-methyl modified nucleotide
  modified_base 76: mod_base = OTHER; note = 2'-O-methyl modified nucleotide
  modified_base 77: mod_base = OTHER; note = 2'-O-methyl modified nucleotide
  modified_base 78: mod_base = OTHER; note = 2'-O-methyl modified nucleotide
  modified_base 79: mod_base = OTHER; note = 2'-O-methyl modified nucleotide
  modified_base 80: mod_base = OTHER; note = 2'-O-methyl modified nucleotide
  modified_base 81: mod_base = OTHER; note = 2'-O-methyl modified nucleotide
  modified_base 82: mod_base = OTHER; note = 2'-O-methyl modified nucleotide
  modified_base 83: mod_base = OTHER; note = 2'-O-methyl modified nucleotide
  modified_base 84: mod_base = OTHER; note = 2'-O-methyl modified nucleotide
  modified_base 85: mod_base = OTHER; note = 2'-O-methyl modified nucleotide
  modified_base 86: mod_base = OTHER; note = 2'-O-methyl modified nucleotide
  modified_base 87: mod_base = OTHER; note = 2'-O-methyl modified nucleotide
  modified_base 88: mod_base = OTHER; note = 2'-O-methyl modified nucleotide
  modified_base 89: mod_base = OTHER; note = 2'-O-methyl modified nucleotide
  modified_base 90: mod_base = OTHER; note = 2'-O-methyl modified nucleotide
  modified_base 91: mod_base = OTHER; note = 2'-O-methyl modified nucleotide
  modified_base 92: mod_base = OTHER; note = 2'-O-methyl modified nucleotide
  modified_base 93: mod_base = OTHER; note = 2'-O-methyl modified nucleotide
  modified_base 94: mod_base = OTHER; note = 2'-O-methyl modified nucleotide
  modified_base 95: mod_base = OTHER; note = 2'-O-methyl modified nucleotide
  modified_base 96: mod_base = OTHER; note = 2'-O-methyl modified nucleotide
  modified_base 97: mod_base = OTHER; note = 2'-O-methyl modified nucleotide with phosphorothioate linkage
  modified_base 98: mod_base = OTHER; note = 2'-O-methyl modified nucleotide with phosphorothioate linkage
  modified_base 99: mod_base = OTHER; note = 2'-O-methyl modified nucleotide with phosphorothioate linkage
  modified_base 100: mod_base = OTHER; note = 2'-O-methyl modified nucleotide
  misc_difference 97..100: note = This region may encompass 0-4 nucleotides

SEQ ID NO: 2512 - RNA, 101 nt, synthetic construct; identical to SEQ ID NO: 1512
  source 1..101: mol_type = other RNA
  modified_base 1: mod_base = OTHER; note = 2'-O-methyl modified nucleotide with phosphorothioate linkage
  modified_base 2: mod_base = OTHER; note = 2'-O-methyl modified nucleotide with phosphorothioate linkage
  modified_base 3: mod_base = OTHER; note = 2'-O-methyl modified nucleotide with phosphorothioate linkage
  modified_base 4: mod_base = OTHER; note = 2'-O-methyl modified nucleotide
  modified_base 5: mod_base = OTHER; note = 2'-O-methyl modified nucleotide
  modified_base 8: mod_base = OTHER; note = 2'-O-methyl modified nucleotide
  modified_base 9: mod_base = OTHER; note = 2'-O-methyl modified nucleotide
  modified_base 11: mod_base = OTHER; note = 2'-O-methyl modified nucleotide
  modified_base 13: mod_base = OTHER; note = 2'-O-methyl modified nucleotide
  modified_base 18: mod_base = OTHER; note = 2'-O-methyl modified nucleotide
  modified_base 22: mod_base = OTHER; note = 2'-O-methyl modified nucleotide
  modified_base 25: mod_base = OTHER; note = 2'-O-methyl modified nucleotide
  modified_base 29: mod_base = OTHER; note = 2'-O-methyl modified nucleotide
  modified_base 30: mod_base = OTHER; note = 2'-O-methyl modified nucleotide
  modified_base 31: mod_base = OTHER; note = 2'-O-methyl modified nucleotide
  modified_base 32: mod_base = OTHER; note = 2'-O-methyl modified nucleotide
  modified_base 37: mod_base = OTHER; note = 2'-O-methyl modified nucleotide
  modified_base 38: mod_base = OTHER; note = 2'-O-methyl modified nucleotide
  modified_base 39: mod_base = OTHER; note = 2'-O-methyl modified nucleotide
  modified_base 40: mod_base = OTHER; note = 2'-O-methyl modified nucleotide
  modified_base 41: mod_base = OTHER; note = 2'-O-methyl modified nucleotide
  modified_base 42: mod_base = OTHER; note = 2'-O-methyl modified nucleotide
  modified_base 43: mod_base = OTHER; note = 2'-O-methyl modified nucleotide
  modified_base 47: mod_base = OTHER; note = 2'-O-methyl modified nucleotide
  modified_base 48: mod_base = OTHER; note = 2'-O-methyl modified nucleotide
  modified_base 51: mod_base = OTHER; note = 2'-O-methyl modified nucleotide
  modified_base 54: mod_base = OTHER; note = nucleotide with phosphorothioate linkage
  modified_base 58: mod_base = OTHER; note = 2'-O-methyl modified nucleotide
  modified_base 59: mod_base = OTHER; note = 2'-O-methyl modified nucleotide
  modified_base 61: mod_base = OTHER; note = 2'-O-methyl modified nucleotide
  modified_base 62: mod_base = OTHER; note = 2'-O-methyl modified nucleotide
  modified_base 63: mod_base = OTHER; note = 2'-O-methyl modified nucleotide
  modified_base 64: mod_base = OTHER; note = 2'-O-methyl modified nucleotide
  modified_base 65: mod_base = OTHER; note = 2'-O-methyl modified nucleotide
  modified_base 66: mod_base = OTHER; note = 2'-O-methyl modified nucleotide
  modified_base 67: mod_base = OTHER; note = 2'-O-methyl modified nucleotide
  modified_base 68: mod_base = OTHER; note = 2'-O-methyl modified nucleotide
  modified_base 69: mod_base = OTHER; note = 2'-O-methyl modified nucleotide
  modified_base 70: mod_base = OTHER; note = 2'-O-methyl modified nucleotide
  modified_base 75: mod_base = OTHER; note = 2'-O-methyl modified nucleotide
  modified_base 77: mod_base = OTHER; note = 2'-O-methyl modified nucleotide
  modified_base 80: mod_base = OTHER; note = 2'-O-methyl modified nucleotide
  modified_base 86: mod_base = OTHER; note = 2'-O-methyl modified nucleotide
  modified_base 87: mod_base = OTHER; note = 2'-O-methyl modified nucleotide
  modified_base 89: mod_base = OTHER; note = 2'-O-methyl modified nucleotide
  modified_base 90: mod_base = OTHER; note = 2'-O-methyl modified nucleotide
  modified_base 91: mod_base = OTHER; note = 2'-O-methyl modified nucleotide
  modified_base 92: mod_base = OTHER; note = 2'-O-methyl modified nucleotide
  modified_base 99: mod_base = OTHER; note = nucleotide with phosphorothioate linkage
  modified_base 100: mod_base = OTHER; note = 2'-O-methyl modified nucleotide with phosphorothioate linkage
  modified_base 101: mod_base = OTHER; note = 2'-O-methyl modified nucleotide

SEQ ID NO: 2513 - RNA, 101 nt, synthetic construct; identical to SEQ ID NO: 1513
  source 1..101: mol_type = other RNA
  modified_base 1: mod_base = OTHER; note = 2'-O-methyl modified nucleotide with phosphorothioate linkage
  modified_base 2: mod_base = OTHER; note = 2'-O-methyl modified nucleotide with phosphorothioate linkage
  modified_base 3: mod_base = OTHER; note = 2'-O-methyl modified nucleotide with phosphorothioate linkage
  modified_base 4: mod_base = OTHER; note = 2'-O-methyl modified nucleotide
  modified_base 5: mod_base = OTHER; note = 2'-O-methyl modified nucleotide
  modified_base 8: mod_base = OTHER; note = 2'-O-methyl modified nucleotide
  modified_base 9: mod_base = OTHER; note = 2'-O-methyl modified nucleotide
  modified_base 11: mod_base = OTHER; note = 2'-O-methyl modified nucleotide
  modified_base 13: mod_base = OTHER; note = 2'-O-methyl modified nucleotide
  modified_base 18: mod_base = OTHER; note = 2'-O-methyl modified nucleotide
  modified_base 22: mod_base = OTHER; note = 2'-O-methyl modified nucleotide
  modified_base 25: mod_base = OTHER; note = 2'-O-methyl modified nucleotide
  modified_base 29: mod_base = OTHER; note = 2'-O-methyl modified nucleotide
  modified_base 30: mod_base = OTHER; note = 2'-O-methyl modified nucleotide
  modified_base 31: mod_base = OTHER; note = 2'-O-methyl modified nucleotide
  modified_base 32: mod_base = OTHER; note = 2'-O-methyl modified nucleotide
  modified_base 37: mod_base = OTHER; note = 2'-O-methyl modified nucleotide
  modified_base 38: mod_base = OTHER; note = 2'-O-methyl modified nucleotide
  modified_base 39: mod_base = OTHER; note = 2'-O-methyl modified nucleotide
  modified_base 40: mod_base = OTHER; note = 2'-O-methyl modified nucleotide
  modified_base 41: mod_base = OTHER; note = 2'-O-methyl modified nucleotide
  modified_base 42: mod_base = OTHER; note = 2'-O-methyl modified nucleotide
  modified_base 43: mod_base = OTHER; note = 2'-O-methyl modified nucleotide
  modified_base 47: mod_base = OTHER; note = 2'-O-methyl modified nucleotide
  modified_base 48: mod_base = OTHER; note = 2'-O-methyl modified nucleotide
  modified_base 51: mod_base = OTHER; note = 2'-O-methyl modified nucleotide
  modified_base 54: mod_base = OTHER; note = nucleotide with phosphorothioate linkage
  modified_base 58: mod_base = OTHER; note = 2'-O-methyl modified nucleotide
  modified_base 59: mod_base = OTHER; note = 2'-O-methyl modified nucleotide
  modified_base 61: mod_base = OTHER; note = 2'-O-methyl modified nucleotide
  modified_base 62: mod_base = OTHER; note = 2'-O-methyl modified nucleotide
  modified_base 63: mod_base = OTHER; note = 2'-O-methyl modified nucleotide
  modified_base 64: mod_base = OTHER; note = 2'-O-methyl modified nucleotide
  modified_base 65: mod_base = OTHER; note = 2'-O-methyl modified nucleotide
  modified_base 66: mod_base = OTHER; note = 2'-O-methyl modified nucleotide
  modified_base 67: mod_base = OTHER; note = 2'-O-methyl modified nucleotide
  modified_base 68: mod_base = OTHER; note = 2'-O-methyl modified nucleotide
  modified_base 69: mod_base = OTHER; note = 2'-O-methyl modified nucleotide
  modified_base 70: mod_base = OTHER; note = 2'-O-methyl modified nucleotide
  modified_base 75: mod_base = OTHER; note = 2'-O-methyl modified nucleotide
  modified_base 77: mod_base = OTHER; note = 2'-O-methyl modified nucleotide
  modified_base 80: mod_base = OTHER; note = 2'-O-methyl modified nucleotide
  modified_base 86: mod_base = OTHER; note = 2'-O-methyl modified nucleotide
  modified_base 87: mod_base = OTHER; note = 2'-O-methyl modified nucleotide
  modified_base 89: mod_base = OTHER; note = 2'-O-methyl modified nucleotide
  modified_base 90: mod_base = OTHER; note = 2'-O-methyl modified nucleotide
  modified_base 91: mod_base = OTHER; note = 2'-O-methyl modified nucleotide
  modified_base 92: mod_base = OTHER; note = 2'-O-methyl modified nucleotide
  modified_base 99: mod_base = OTHER; note = nucleotide with phosphorothioate linkage
  modified_base 100: mod_base = OTHER; note = 2'-O-methyl modified nucleotide with phosphorothioate linkage
  modified_base 101: mod_base = OTHER; note = 2'-O-methyl modified nucleotide

SEQ ID NO: 2514 - RNA, 101 nt, synthetic construct; identical to SEQ ID NO: 1514
  source 1..101: mol_type = other RNA
  modified_base 1: mod_base = OTHER; note = 2'-O-methyl modified nucleotide with phosphorothioate linkage
  modified_base 2: mod_base = OTHER; note = 2'-O-methyl modified nucleotide with phosphorothioate linkage
  modified_base 3: mod_base = OTHER; note = 2'-O-methyl modified nucleotide with phosphorothioate linkage
  modified_base 4: mod_base = OTHER; note = 2'-O-methyl modified nucleotide
  modified_base 5: mod_base = OTHER; note = 2'-O-methyl modified nucleotide
  modified_base 8: mod_base = OTHER; note = 2'-O-methyl modified nucleotide
  modified_base 9: mod_base = OTHER; note = 2'-O-methyl modified nucleotide
  modified_base 11: mod_base = OTHER; note = 2'-O-methyl modified nucleotide
  modified_base 13: mod_base = OTHER; note = 2'-O-methyl modified nucleotide
  modified_base 18: mod_base = OTHER; note = 2'-O-methyl modified nucleotide
  modified_base 22: mod_base = OTHER; note = 2'-O-methyl modified nucleotide
  modified_base 25: mod_base = OTHER; note = 2'-O-methyl modified nucleotide
  modified_base 29: mod_base = OTHER; note = 2'-O-methyl modified nucleotide
  modified_base 30: mod_base = OTHER; note = 2'-O-methyl modified nucleotide
  modified_base 31: mod_base = OTHER; note = 2'-O-methyl modified nucleotide
  modified_base 32: mod_base = OTHER; note = 2'-O-methyl modified nucleotide
  modified_base 37: mod_base = OTHER; note = 2'-O-methyl modified nucleotide
  modified_base 38: mod_base = OTHER; note = 2'-O-methyl modified nucleotide
  modified_base 39: mod_base = OTHER; note = 2'-O-methyl modified nucleotide
  modified_base 40: mod_base = OTHER; note = 2'-O-methyl modified nucleotide
  modified_base 41: mod_base = OTHER; note = 2'-O-methyl modified nucleotide
  modified_base 42: mod_base = OTHER; note = 2'-O-methyl modified nucleotide
  modified_base 43: mod_base = OTHER; note = 2'-O-methyl modified nucleotide
  modified_base 47: mod_base = OTHER; note = 2'-O-methyl modified nucleotide
  modified_base 48: mod_base = OTHER; note = 2'-O-methyl modified nucleotide
  modified_base 51: mod_base = OTHER; note = 2'-O-methyl modified nucleotide
  modified_base 54: mod_base = OTHER; note = nucleotide with phosphorothioate linkage
  modified_base 58: mod_base = OTHER; note = 2'-O-methyl modified nucleotide
  modified_base 59: mod_base = OTHER; note = 2'-O-methyl modified nucleotide
  modified_base 61: mod_base = OTHER; note = 2'-O-methyl modified nucleotide
  modified_base 62: mod_base = OTHER; note = 2'-O-methyl modified nucleotide
  modified_base 63: mod_base = OTHER; note = 2'-O-methyl modified nucleotide
  modified_base 64: mod_base = OTHER; note = 2'-O-methyl modified nucleotide
  modified_base 65: mod_base = OTHER; note = 2'-O-methyl modified nucleotide
  modified_base 66: mod_base = OTHER; note = 2'-O-methyl modified nucleotide
  modified_base 67: mod_base = OTHER; note = 2'-O-methyl modified nucleotide
  modified_base 68: mod_base = OTHER; note = 2'-O-methyl modified nucleotide
  modified_base 69: mod_base = OTHER; note = 2'-O-methyl modified nucleotide
  modified_base 70: mod_base = OTHER; note = 2'-O-methyl modified nucleotide
  modified_base 75: mod_base = OTHER; note = 2'-O-methyl modified nucleotide
  modified_base 77: mod_base = OTHER; note = 2'-O-methyl modified nucleotide
  modified_base 80: mod_base = OTHER; note = 2'-O-methyl modified nucleotide
  modified_base 86: mod_base = OTHER; note = 2'-O-methyl modified nucleotide
  modified_base 87: mod_base = OTHER; note = 2'-O-methyl modified nucleotide
  modified_base 89: mod_base = OTHER; note = 2'-O-methyl modified nucleotide
  modified_base 90: mod_base = OTHER; note = 2'-O-methyl modified nucleotide
  modified_base 91: mod_base = OTHER; note = 2'-O-methyl modified nucleotide
  modified_base 92: mod_base = OTHER; note = 2'-O-methyl modified nucleotide
  modified_base 99: mod_base = OTHER; note = nucleotide with phosphorothioate linkage
  modified_base 100: mod_base = OTHER; note = 2'-O-methyl modified nucleotide with phosphorothioate linkage
  modified_base 101: mod_base = OTHER; note = 2'-O-methyl modified nucleotide

SEQ ID NO: 2515 - RNA, 101 nt, synthetic construct; identical to SEQ ID NO: 1515
  source 1..101: mol_type = other RNA
  modified_base 1: mod_base = OTHER; note = 2'-O-methyl modified nucleotide with phosphorothioate linkage
  modified_base 2: mod_base = OTHER; note = 2'-O-methyl modified nucleotide with phosphorothioate linkage
  modified_base 3: mod_base = OTHER; note = 2'-O-methyl modified nucleotide with phosphorothioate linkage
  modified_base 4: mod_base = OTHER; note = 2'-O-methyl modified nucleotide
  modified_base 5: mod_base = OTHER; note = 2'-O-methyl modified nucleotide
  modified_base 8: mod_base = OTHER; note = 2'-O-methyl modified nucleotide
  modified_base 9: mod_base = OTHER; note = 2'-O-methyl modified nucleotide
  modified_base 11: mod_base = OTHER; note = 2'-O-methyl modified nucleotide
  modified_base 13: mod_base = OTHER; note = 2'-O-methyl modified nucleotide
  modified_base 18: mod_base = OTHER; note = 2'-O-methyl modified nucleotide
  modified_base 22: mod_base = OTHER; note = 2'-O-methyl modified nucleotide
  modified_base 25: mod_base = OTHER; note = 2'-O-methyl modified nucleotide
  modified_base 29: mod_base = OTHER; note = 2'-O-methyl modified nucleotide
  modified_base 30: mod_base = OTHER; note = 2'-O-methyl modified nucleotide
  modified_base 31: mod_base = OTHER; note = 2'-O-methyl modified nucleotide
  modified_base 32: mod_base = OTHER; note = 2'-O-methyl modified nucleotide
  modified_base 37: mod_base = OTHER; note = 2'-O-methyl modified nucleotide
  modified_base 38: mod_base = OTHER; note = 2'-O-methyl modified nucleotide
  modified_base 39: mod_base = OTHER; note = 2'-O-methyl modified nucleotide
  modified_base 40: mod_base = OTHER; note = 2'-O-methyl modified nucleotide
  modified_base 41: mod_base = OTHER; note = 2'-O-methyl modified nucleotide
  modified_base 42: mod_base = OTHER; note = 2'-O-methyl modified nucleotide
  modified_base 43: mod_base = OTHER; note = 2'-O-methyl modified nucleotide
  modified_base 47: mod_base = OTHER; note = 2'-O-methyl modified nucleotide
  modified_base 48: mod_base = OTHER; note = 2'-O-methyl modified nucleotide
  modified_base 51: mod_base = OTHER; note = 2'-O-methyl modified nucleotide
  modified_base 54: mod_base = OTHER; note = nucleotide with phosphorothioate linkage
  modified_base 58: mod_base = OTHER; note = 2'-O-methyl modified nucleotide
  modified_base 59: mod_base = OTHER; note = 2'-O-methyl modified nucleotide
  modified_base 61: mod_base = OTHER; note = 2'-O-methyl modified nucleotide
  modified_base 62: mod_base = OTHER; note = 2'-O-methyl modified nucleotide
  modified_base 63: mod_base = OTHER; note = 2'-O-methyl modified nucleotide
  modified_base 64: mod_base = OTHER; note = 2'-O-methyl modified nucleotide
  modified_base 65: mod_base = OTHER; note = 2'-O-methyl modified nucleotide
  modified_base 66: mod_base = OTHER; note = 2'-O-methyl modified nucleotide
  modified_base 67: mod_base = OTHER; note = 2'-O-methyl modified nucleotide
  modified_base 68: mod_base = OTHER; note = 2'-O-methyl modified nucleotide
  modified_base 69: mod_base = OTHER; note = 2'-O-methyl modified nucleotide
  modified_base 70: mod_base = OTHER; note = 2'-O-methyl modified nucleotide
  modified_base 75: mod_base = OTHER; note = 2'-O-methyl modified nucleotide
  modified_base 77: mod_base = OTHER; note = 2'-O-methyl modified nucleotide
  modified_base 80: mod_base = OTHER; note = 2'-O-methyl modified nucleotide
  modified_base 86: mod_base = OTHER; note = 2'-O-methyl modified nucleotide
  modified_base 87: mod_base = OTHER; note = 2'-O-methyl modified nucleotide
  modified_base 89: mod_base = OTHER; note = 2'-O-methyl modified nucleotide
  modified_base 90: mod_base = OTHER; note = 2'-O-methyl modified nucleotide
  modified_base 91: mod_base = OTHER; note = 2'-O-methyl modified nucleotide
  modified_base 92: mod_base = OTHER; note = 2'-O-methyl modified nucleotide
  modified_base 99: mod_base = OTHER; note = nucleotide with phosphorothioate linkage
  modified_base 100: mod_base = OTHER; note = 2'-O-methyl modified nucleotide with phosphorothioate linkage
  modified_base 101: mod_base = OTHER; note = 2'-O-methyl modified nucleotide

SEQ ID NO: 2516 - RNA, 101 nt, synthetic construct; identical to SEQ ID NO: 1516
  source 1..101: mol_type = other RNA
  modified_base 1: mod_base = OTHER; note = 2'-O-methyl modified nucleotide with phosphorothioate linkage
  modified_base 2: mod_base = OTHER; note = 2'-O-methyl modified nucleotide with phosphorothioate linkage
  modified_base 3: mod_base = OTHER; note = 2'-O-methyl modified nucleotide with phosphorothioate linkage
  modified_base 4: mod_base = OTHER; note = 2'-O-methyl modified nucleotide
  modified_base 5: mod_base = OTHER; note = 2'-O-methyl modified nucleotide
  modified_base 8: mod_base = OTHER; note = 2'-O-methyl modified nucleotide
  modified_base 9: mod_base = OTHER; note = 2'-O-methyl modified nucleotide
  modified_base 11: mod_base = OTHER; note = 2'-O-methyl modified nucleotide
  modified_base 13: mod_base = OTHER; note = 2'-O-methyl modified nucleotide
  modified_base 18: mod_base = OTHER; note = 2'-O-methyl modified nucleotide
  modified_base 22: mod_base = OTHER; note = 2'-O-methyl modified nucleotide
  modified_base 25: mod_base = OTHER; note = 2'-O-methyl modified nucleotide
  modified_base 29: mod_base = OTHER; note = 2'-O-methyl modified nucleotide
  modified_base 30: mod_base = OTHER; note = 2'-O-methyl modified nucleotide
  modified_base 31: mod_base = OTHER; note = 2'-O-methyl modified nucleotide
  modified_base 32: mod_base = OTHER; note = 2'-O-methyl modified nucleotide
  modified_base 37: mod_base = OTHER; note = 2'-O-methyl modified nucleotide
  modified_base 38: mod_base = OTHER; note = 2'-O-methyl modified nucleotide
  modified_base 39: mod_base = OTHER; note = 2'-O-methyl modified nucleotide
  modified_base 40: mod_base = OTHER; note = 2'-O-methyl modified nucleotide
  modified_base 41: mod_base = OTHER; note = 2'-O-methyl modified nucleotide
  modified_base 42: mod_base = OTHER; note = 2'-O-methyl modified nucleotide
  modified_base 43: mod_base = OTHER; note = 2'-O-methyl modified nucleotide
  modified_base 47: mod_base = OTHER; note = 2'-O-methyl modified nucleotide
  modified_base 48: mod_base = OTHER; note = 2'-O-methyl modified nucleotide
  modified_base 51: mod_base = OTHER; note = 2'-O-methyl modified nucleotide
  modified_base 54: mod_base = OTHER; note = nucleotide with phosphorothioate linkage
  modified_base 58: mod_base = OTHER; note = 2'-O-methyl modified nucleotide
  modified_base 59: mod_base = OTHER; note = 2'-O-methyl modified nucleotide
  modified_base 61: mod_base = OTHER; note = 2'-O-methyl modified nucleotide
  modified_base 62: mod_base = OTHER; note = 2'-O-methyl modified nucleotide
  modified_base 63: mod_base = OTHER; note = 2'-O-methyl modified nucleotide
  modified_base 64: mod_base = OTHER; note = 2'-O-methyl modified nucleotide
  modified_base 65: mod_base = OTHER; note = 2'-O-methyl modified nucleotide
  modified_base 66: mod_base = OTHER; note = 2'-O-methyl modified nucleotide
  modified_base 67: mod_base = OTHER; note = 2'-O-methyl modified nucleotide
  modified_base 68: mod_base = OTHER; note = 2'-O-methyl modified nucleotide
  modified_base 69: mod_base = OTHER; note = 2'-O-methyl modified nucleotide
  modified_base 70: mod_base = OTHER; note = 2'-O-methyl modified nucleotide
  modified_base 75: mod_base = OTHER; note = 2'-O-methyl modified nucleotide
  modified_base 77: mod_base = OTHER; note = 2'-O-methyl modified nucleotide
  modified_base 80: mod_base = OTHER; note = 2'-O-methyl modified nucleotide
  modified_base 86: mod_base = OTHER; note = 2'-O-methyl modified nucleotide
  modified_base 87: mod_base = OTHER; note = 2'-O-methyl modified nucleotide
  modified_base 89: mod_base = OTHER; note = 2'-O-methyl modified nucleotide
  modified_base 90: mod_base = OTHER; note = 2'-O-methyl modified nucleotide
  modified_base 91: mod_base = OTHER; note = 2'-O-methyl modified nucleotide
  modified_base 92: mod_base = OTHER; note = 2'-O-methyl modified nucleotide
  modified_base 99: mod_base = OTHER; note = nucleotide with phosphorothioate linkage
  modified_base 100: mod_base = OTHER; note = 2'-O-methyl modified nucleotide with phosphorothioate linkage
  modified_base 101: mod_base = OTHER; note = 2'-O-methyl modified nucleotide

SEQ ID NO: 2517 - RNA, 101 nt, synthetic construct; identical to SEQ ID NO: 1517
  source 1..101: mol_type = other RNA
  modified_base 1: mod_base = OTHER; note = 2'-O-methyl modified nucleotide with phosphorothioate linkage
  modified_base 2: mod_base = OTHER; note = 2'-O-methyl modified nucleotide with phosphorothioate linkage
  modified_base 3: mod_base = OTHER; note = 2'-O-methyl modified nucleotide with phosphorothioate linkage
  modified_base 4: mod_base = OTHER; note = 2'-O-methyl modified nucleotide
  modified_base 5: mod_base = OTHER; note = 2'-O-methyl modified nucleotide
  modified_base 8: mod_base = OTHER; note = 2'-O-methyl modified nucleotide
  modified_base 9: mod_base = OTHER; note = 2'-O-methyl modified nucleotide
  modified_base 11: mod_base = OTHER; note = 2'-O-methyl modified nucleotide
  modified_base 13: mod_base = OTHER; note = 2'-O-methyl modified nucleotide
  modified_base 18: mod_base = OTHER; note = 2'-O-methyl modified nucleotide
  modified_base 22: mod_base = OTHER; note = 2'-O-methyl modified nucleotide
  modified_base 25: mod_base = OTHER; note = 2'-O-methyl modified nucleotide
  modified_base 29: mod_base = OTHER; note = 2'-O-methyl modified nucleotide
  modified_base 30: mod_base = OTHER; note = 2'-O-methyl modified nucleotide
  modified_base 31: mod_base = OTHER; note = 2'-O-methyl modified nucleotide
  modified_base 32: mod_base = OTHER; note = 2'-O-methyl modified nucleotide
  modified_base 37: mod_base = OTHER; note = 2'-O-methyl modified nucleotide
  modified_base 38: mod_base = OTHER; note = 2'-O-methyl modified nucleotide
  modified_base 39: mod_base = OTHER; note = 2'-O-methyl modified nucleotide
  modified_base 40: mod_base = OTHER; note = 2'-O-methyl modified nucleotide
  modified_base 41: mod_base = OTHER; note = 2'-O-methyl modified nucleotide
  modified_base 42: mod_base = OTHER; note = 2'-O-methyl modified nucleotide
  modified_base 43: mod_base = OTHER; note = 2'-O-methyl modified nucleotide
  modified_base 47: mod_base = OTHER; note = 2'-O-methyl modified nucleotide
  modified_base 48: mod_base = OTHER; note = 2'-O-methyl modified nucleotide
  modified_base 51: mod_base = OTHER; note = 2'-O-methyl modified nucleotide
  modified_base 54: mod_base = OTHER; note = nucleotide with phosphorothioate linkage
  modified_base 58: mod_base = OTHER; note = 2'-O-methyl modified nucleotide
  modified_base 59: mod_base = OTHER; note = 2'-O-methyl modified nucleotide
  modified_base 61: mod_base = OTHER; note = 2'-O-methyl modified nucleotide
  modified_base 62: mod_base = OTHER; note = 2'-O-methyl modified nucleotide
  modified_base 63: mod_base = OTHER; note = 2'-O-methyl modified nucleotide
  modified_base 64: mod_base = OTHER; note = 2'-O-methyl modified nucleotide
  modified_base 65: mod_base = OTHER; note = 2'-O-methyl modified nucleotide
  modified_base 66: mod_base = OTHER; note = 2'-O-methyl modified nucleotide
  modified_base 67: mod_base = OTHER; note = 2'-O-methyl modified nucleotide
  modified_base 68: mod_base = OTHER; note = 2'-O-methyl modified nucleotide
  modified_base 69: mod_base = OTHER; note = 2'-O-methyl modified nucleotide
  modified_base 70: mod_base = OTHER; note = 2'-O-methyl modified nucleotide
  modified_base 75: mod_base = OTHER; note = 2'-O-methyl modified nucleotide
  modified_base 77: mod_base = OTHER; note = 2'-O-methyl modified nucleotide
  modified_base 80: mod_base = OTHER; note = 2'-O-methyl modified nucleotide
  modified_base 86: mod_base = OTHER; note = 2'-O-methyl modified nucleotide
  modified_base 87: mod_base = OTHER; note = 2'-O-methyl modified nucleotide
  modified_base 89: mod_base = OTHER; note = 2'-O-methyl modified nucleotide
  modified_base 90: mod_base = OTHER; note = 2'-O-methyl modified nucleotide
  modified_base 91: mod_base = OTHER; note = 2'-O-methyl modified nucleotide
  modified_base 92: mod_base = OTHER; note = 2'-O-methyl modified nucleotide
  modified_base 99: mod_base = OTHER; note = nucleotide with phosphorothioate linkage
  modified_base 100: mod_base = OTHER; note = 2'-O-methyl modified nucleotide with phosphorothioate linkage
  modified_base 101: mod_base = OTHER; note = 2'-O-methyl modified nucleotide

SEQ ID NO: 2518 - RNA, 101 nt, synthetic construct; identical to SEQ ID NO: 1518
  source 1..101: mol_type = other RNA
  modified_base 1: mod_base = OTHER; note = 2'-O-methyl modified nucleotide with phosphorothioate linkage
  modified_base 2: mod_base = OTHER; note = 2'-O-methyl modified nucleotide with phosphorothioate linkage
  modified_base 3: mod_base = OTHER; note = 2'-O-methyl modified nucleotide with phosphorothioate linkage
  modified_base 4: mod_base = OTHER; note = 2'-O-methyl modified nucleotide
  modified_base 5: mod_base = OTHER; note = 2'-O-methyl modified nucleotide
  modified_base 8: mod_base = OTHER; note = 2'-O-methyl modified nucleotide
  modified_base 9: mod_base = OTHER; note = 2'-O-methyl modified nucleotide
  modified_base 11: mod_base = OTHER; note = 2'-O-methyl modified nucleotide
  modified_base 13: mod_base = OTHER; note = 2'-O-methyl modified nucleotide
  modified_base 18: mod_base = OTHER; note = 2'-O-methyl modified nucleotide
  modified_base 22: mod_base = OTHER; note = 2'-O-methyl modified nucleotide
  modified_base 25: mod_base = OTHER; note = 2'-O-methyl modified nucleotide
  modified_base 29: mod_base = OTHER; note = 2'-O-methyl modified nucleotide
  modified_base 30: mod_base = OTHER; note = 2'-O-methyl modified nucleotide
  modified_base 31: mod_base = OTHER; note = 2'-O-methyl modified nucleotide
  modified_base 32: mod_base = OTHER; note = 2'-O-methyl modified nucleotide
  modified_base 37: mod_base = OTHER; note = 2'-O-methyl modified nucleotide
  modified_base 38: mod_base = OTHER; note = 2'-O-methyl modified nucleotide
  modified_base 39: mod_base = OTHER; note = 2'-O-methyl modified nucleotide
  modified_base 40: mod_base = OTHER; note = 2'-O-methyl modified nucleotide
  modified_base 41: mod_base = OTHER; note = 2'-O-methyl modified nucleotide
  modified_base 42: mod_base = OTHER; note = 2'-O-methyl modified nucleotide
  modified_base 43: mod_base = OTHER; note = 2'-O-methyl modified nucleotide
  modified_base 47: mod_base = OTHER; note = 2'-O-methyl modified nucleotide
  modified_base 48: mod_base = OTHER; note = 2'-O-methyl modified nucleotide
  modified_base 51: mod_base = OTHER; note = 2'-O-methyl modified nucleotide
  modified_base 54: mod_base = OTHER; note = nucleotide with phosphorothioate linkage
  modified_base 58: mod_base = OTHER; note = 2'-O-methyl modified nucleotide
  modified_base 59: mod_base = OTHER; note = 2'-O-methyl modified nucleotide
  modified_base 61: mod_base = OTHER; note = 2'-O-methyl modified nucleotide
  modified_base 62: mod_base = OTHER; note = 2'-O-methyl modified nucleotide
  modified_base 63: mod_base = OTHER; note = 2'-O-methyl modified nucleotide
  modified_base 64: mod_base = OTHER; note = 2'-O-methyl modified nucleotide
  modified_base 65: mod_base = OTHER; note = 2'-O-methyl modified nucleotide
  modified_base 66: mod_base = OTHER; note = 2'-O-methyl modified nucleotide
  modified_base 67: mod_base = OTHER; note = 2'-O-methyl modified nucleotide
  modified_base 68: mod_base = OTHER; note = 2'-O-methyl modified nucleotide
  modified_base 69: mod_base = OTHER; note = 2'-O-methyl modified nucleotide
  modified_base 70: mod_base = OTHER; note = 2'-O-methyl modified nucleotide
  modified_base 75: mod_base = OTHER; note = 2'-O-methyl modified nucleotide
  modified_base 77: mod_base = OTHER; note = 2'-O-methyl modified nucleotide
  modified_base 80: mod_base = OTHER; note = 2'-O-methyl modified nucleotide
  modified_base 86: mod_base = OTHER; note = 2'-O-methyl modified nucleotide
  modified_base 87: mod_base = OTHER; note = 2'-O-methyl modified nucleotide
  modified_base 89: mod_base = OTHER; note = 2'-O-methyl modified nucleotide
  modified_base 90: mod_base = OTHER; note = 2'-O-methyl modified nucleotide
  modified_base 91: mod_base = OTHER; note = 2'-O-methyl modified nucleotide
  modified_base 92: mod_base = OTHER; note = 2'-O-methyl modified nucleotide
  modified_base 99: mod_base = OTHER; note = nucleotide with phosphorothioate linkage
  modified_base 100: mod_base = OTHER; note = 2'-O-methyl modified nucleotide with phosphorothioate linkage
  modified_base 101: mod_base = OTHER; note = 2'-O-methyl modified nucleotide

SEQ ID NO: 2519 - RNA, 101 nt, synthetic construct; identical to SEQ ID NO: 1519
  source 1..101: mol_type = other RNA
  modified_base 1: mod_base = OTHER; note = 2'-O-methyl modified nucleotide with phosphorothioate linkage
  modified_base 2: mod_base = OTHER; note = 2'-O-methyl modified nucleotide with phosphorothioate linkage
  modified_base 3: mod_base = OTHER; note = 2'-O-methyl modified nucleotide with phosphorothioate linkage
  modified_base 4: mod_base = OTHER; note = 2'-O-methyl modified nucleotide
  modified_base 5: mod_base = OTHER; note = 2'-O-methyl modified nucleotide
  modified_base 8: mod_base = OTHER; note = 2'-O-methyl modified nucleotide
  modified_base 9: mod_base = OTHER; note = 2'-O-methyl modified nucleotide
  modified_base 11: mod_base = OTHER; note = 2'-O-methyl modified nucleotide
  modified_base 13: mod_base = OTHER; note = 2'-O-methyl modified nucleotide
  modified_base 18: mod_base = OTHER; note = 2'-O-methyl modified nucleotide
  modified_base 22: mod_base = OTHER; note = 2'-O-methyl modified nucleotide
  modified_base 25: mod_base = OTHER; note = 2'-O-methyl modified nucleotide
  modified_base 29: mod_base = OTHER; note = 2'-O-methyl modified nucleotide
  modified_base 30: mod_base = OTHER; note = 2'-O-methyl modified nucleotide
  modified_base 31: mod_base = OTHER; note = 2'-O-methyl modified nucleotide
  modified_base 32: mod_base = OTHER; note = 2'-O-methyl modified nucleotide
  modified_base 37: mod_base = OTHER; note = 2'-O-methyl modified nucleotide
  modified_base 38: mod_base = OTHER; note = 2'-O-methyl modified nucleotide
  modified_base 39: mod_base = OTHER; note = 2'-O-methyl modified nucleotide
  modified_base 40: mod_base = OTHER; note = 2'-O-methyl modified nucleotide
  modified_base 41: mod_base = OTHER; note = 2'-O-methyl modified nucleotide
  modified_base 42: mod_base = OTHER; note = 2'-O-methyl modified nucleotide
  modified_base 43: mod_base = OTHER; note = 2'-O-methyl modified nucleotide
  modified_base 47: mod_base = OTHER; note = 2'-O-methyl modified nucleotide
  modified_base 48: mod_base = OTHER; note = 2'-O-methyl modified nucleotide
  modified_base 51: mod_base = OTHER; note = 2'-O-methyl modified nucleotide
  modified_base 54: mod_base = OTHER; note = nucleotide with phosphorothioate linkage
  modified_base 58: mod_base = OTHER; note = 2'-O-methyl modified nucleotide
  modified_base 59: mod_base = OTHER; note = 2'-O-methyl modified nucleotide
  modified_base 61: mod_base = OTHER; note = 2'-O-methyl modified nucleotide
  modified_base 62: mod_base = OTHER; note = 2'-O-methyl modified nucleotide
  modified_base 63: mod_base = OTHER; note = 2'-O-methyl modified nucleotide
  modified_base 64: mod_base = OTHER; note = 2'-O-methyl modified nucleotide
  modified_base 65: mod_base = OTHER; note = 2'-O-methyl modified nucleotide
  modified_base 66: mod_base = OTHER; note = 2'-O-methyl modified nucleotide
  modified_base 67: mod_base = OTHER; note = 2'-O-methyl modified nucleotide
  modified_base 68: mod_base = OTHER; note = 2'-O-methyl modified nucleotide
  modified_base 69: mod_base = OTHER; note = 2'-O-methyl modified nucleotide
  modified_base 70: mod_base = OTHER; note = 2'-O-methyl modified nucleotide
  modified_base 75: mod_base = OTHER; note = 2'-O-methyl modified nucleotide
  modified_base 77: mod_base = OTHER; note = 2'-O-methyl modified nucleotide
  modified_base 80: mod_base = OTHER; note = 2'-O-methyl modified nucleotide
  modified_base 86: mod_base = OTHER; note = 2'-O-methyl modified nucleotide
  modified_base 87: mod_base = OTHER; note = 2'-O-methyl modified nucleotide
  modified_base 89: mod_base = OTHER; note = 2'-O-methyl modified nucleotide
  modified_base 90: mod_base = OTHER; note = 2'-O-methyl modified nucleotide
  modified_base 91: mod_base = OTHER; note = 2'-O-methyl modified nucleotide
  modified_base 92: mod_base = OTHER; note = 2'-O-methyl modified nucleotide
  modified_base 99: mod_base = OTHER; note = nucleotide with phosphorothioate linkage
  modified_base 100: mod_base = OTHER; note = 2'-O-methyl modified nucleotide with phosphorothioate linkage
  modified_base 101: mod_base = OTHER; note = 2'-O-methyl modified nucleotide

SEQ ID NO: 2520 - RNA, 101 nt, synthetic construct; identical to SEQ ID NO: 1520
  source 1..101: mol_type = other RNA
  modified_base 1: mod_base = OTHER; note = 2'-O-methyl modified nucleotide with phosphorothioate linkage
  modified_base 2: mod_base = OTHER; note = 2'-O-methyl modified nucleotide with phosphorothioate linkage
  modified_base 3: mod_base = OTHER; note = 2'-O-methyl modified nucleotide with phosphorothioate linkage
  modified_base 4: mod_base = OTHER; note = 2'-O-methyl modified nucleotide
  modified_base 5: mod_base = OTHER; note = 2'-O-methyl modified nucleotide
  modified_base 8: mod_base = OTHER; note = 2'-O-methyl modified nucleotide
  modified_base 9: mod_base = OTHER; note = 2'-O-methyl modified nucleotide
  modified_base 11: mod_base = OTHER; note = 2'-O-methyl modified nucleotide
  modified_base 13: mod_base = OTHER; note = 2'-O-methyl modified nucleotide
  modified_base 18: mod_base = OTHER; note = 2'-O-methyl modified nucleotide
  modified_base 22: mod_base = OTHER; note = 2'-O-methyl modified nucleotide
  modified_base 25: mod_base = OTHER; note = 2'-O-methyl modified nucleotide
  modified_base 29: mod_base = OTHER; note = 2'-O-methyl modified nucleotide
  modified_base 30: mod_base = OTHER; note = 2'-O-methyl modified nucleotide
  modified_base 31: mod_base = OTHER; note = 2'-O-methyl modified nucleotide
  modified_base 32: mod_base = OTHER; note = 2'-O-methyl modified nucleotide
  modified_base 37: mod_base = OTHER; note = 2'-O-methyl modified nucleotide
  modified_base 38: mod_base = OTHER; note = 2'-O-methyl modified nucleotide
  modified_base 39: mod_base = OTHER; note = 2'-O-methyl modified nucleotide
  modified_base 40: mod_base = OTHER; note = 2'-O-methyl modified nucleotide
  modified_base 41: mod_base = OTHER; note = 2'-O-methyl modified nucleotide
  modified_base 42: mod_base = OTHER; note = 2'-O-methyl modified nucleotide
  modified_base 43: mod_base = OTHER; note = 2'-O-methyl modified nucleotide
  modified_base 47: mod_base = OTHER; note = 2'-O-methyl modified nucleotide
  modified_base 48: mod_base = OTHER; note = 2'-O-methyl modified nucleotide
  modified_base 51: mod_base = OTHER; note = 2'-O-methyl modified nucleotide
  modified_base 54: mod_base = OTHER; note = nucleotide with phosphorothioate linkage
  modified_base 58: mod_base = OTHER; note = 2'-O-methyl modified nucleotide
  modified_base 59: mod_base = OTHER; note = 2'-O-methyl modified nucleotide
  modified_base 61: mod_base = OTHER; note = 2'-O-methyl modified nucleotide
  modified_base 62: mod_base = OTHER; note = 2'-O-methyl modified nucleotide
  modified_base 63: mod_base = OTHER; note = 2'-O-methyl modified nucleotide
  modified_base 64: mod_base = OTHER; note = 2'-O-methyl modified nucleotide
  modified_base 65: mod_base = OTHER; note = 2'-O-methyl modified nucleotide
  modified_base 66: mod_base = OTHER; note = 2'-O-methyl modified nucleotide
  modified_base 67: mod_base = OTHER; note = 2'-O-methyl modified nucleotide
  modified_base 68: mod_base = OTHER; note = 2'-O-methyl modified nucleotide
  modified_base 69: mod_base = OTHER; note = 2'-O-methyl modified nucleotide
  modified_base 70: mod_base = OTHER; note = 2'-O-methyl modified nucleotide
  modified_base 75: mod_base = OTHER; note = 2'-O-methyl modified nucleotide
  modified_base 77: mod_base = OTHER; note = 2'-O-methyl modified nucleotide
  modified_base 80: mod_base = OTHER; note = 2'-O-methyl modified nucleotide
  modified_base 86: mod_base = OTHER; note = 2'-O-methyl modified nucleotide
  modified_base 87: mod_base = OTHER; note = 2'-O-methyl modified nucleotide
  modified_base 89: mod_base = OTHER; note = 2'-O-methyl modified nucleotide
  modified_base 90: mod_base = OTHER; note = 2'-O-methyl modified nucleotide
  modified_base 91: mod_base = OTHER; note = 2'-O-methyl modified nucleotide
  modified_base 92: mod_base = OTHER; note = 2'-O-methyl modified nucleotide
  modified_base 99: mod_base = OTHER; note = nucleotide with phosphorothioate linkage
  modified_base 100: mod_base = OTHER; note = 2'-O-methyl modified nucleotide with phosphorothioate linkage
  modified_base 101: mod_base = OTHER; note = 2'-O-methyl modified nucleotide

SEQ ID NO: 2521 - RNA, 101 nt, synthetic construct; identical to SEQ ID NO: 1521
  source 1..101: mol_type = other RNA
  modified_base 1: mod_base = OTHER; note = 2'-O-methyl modified nucleotide with phosphorothioate linkage
  modified_base 2: mod_base = OTHER; note = 2'-O-methyl modified nucleotide with phosphorothioate linkage
  modified_base 3: mod_base = OTHER; note = 2'-O-methyl modified nucleotide with phosphorothioate linkage
  modified_base 4: mod_base = OTHER; note = 2'-O-methyl modified nucleotide
  modified_base 5: mod_base = OTHER; note = 2'-O-methyl modified nucleotide
  modified_base 8: mod_base = OTHER; note = 2'-O-methyl modified nucleotide
  modified_base 9: mod_base = OTHER; note = 2'-O-methyl modified nucleotide
  modified_base 11: mod_base = OTHER; note = 2'-O-methyl modified nucleotide
  modified_base 13: mod_base = OTHER; note = 2'-O-methyl modified nucleotide
  modified_base 18: mod_base = OTHER; note = 2'-O-methyl modified nucleotide
  modified_base 22: mod_base = OTHER; note = 2'-O-methyl modified nucleotide
  modified_base 25: mod_base = OTHER; note = 2'-O-methyl modified nucleotide
  modified_base 29: mod_base = OTHER; note = 2'-O-methyl modified nucleotide
  modified_base 30: mod_base = OTHER; note = 2'-O-methyl modified nucleotide
  modified_base 31: mod_base = OTHER; note = 2'-O-methyl modified nucleotide
  modified_base 32: mod_base = OTHER; note = 2'-O-methyl modified nucleotide
  modified_base 37: mod_base = OTHER; note = 2'-O-methyl modified nucleotide
  modified_base 38: mod_base = OTHER; note = 2'-O-methyl modified nucleotide
  modified_base 39: mod_base = OTHER; note = 2'-O-methyl modified nucleotide
  modified_base 40: mod_base = OTHER; note = 2'-O-methyl modified nucleotide
  modified_base 41: mod_base = OTHER; note = 2'-O-methyl modified nucleotide
  modified_base 42: mod_base = OTHER; note = 2'-O-methyl modified nucleotide
  modified_base 43: mod_base = OTHER; note = 2'-O-methyl modified nucleotide
  modified_base 47: mod_base = OTHER; note = 2'-O-methyl modified nucleotide
  modified_base 48: mod_base = OTHER; note = 2'-O-methyl modified nucleotide
  modified_base 51: mod_base = OTHER; note = 2'-O-methyl modified nucleotide
  modified_base 54: mod_base = OTHER; note = nucleotide with phosphorothioate linkage
  modified_base 58: mod_base = OTHER; note = 2'-O-methyl modified nucleotide
  modified_base 59: mod_base = OTHER; note = 2'-O-methyl modified nucleotide
  modified_base 61: mod_base = OTHER; note = 2'-O-methyl modified nucleotide
  modified_base 62: mod_base = OTHER; note = 2'-O-methyl modified nucleotide
  modified_base 63: mod_base = OTHER; note = 2'-O-methyl modified nucleotide
  modified_base 64: mod_base = OTHER; note = 2'-O-methyl modified nucleotide
  modified_base 65: mod_base = OTHER; note = 2'-O-methyl modified nucleotide
  modified_base 66: mod_base = OTHER; note = 2'-O-methyl modified nucleotide
  modified_base 67: mod_base = OTHER; note = 2'-O-methyl modified nucleotide
  modified_base 68: mod_base = OTHER; note = 2'-O-methyl modified nucleotide
  modified_base 69: mod_base = OTHER; note = 2'-O-methyl modified nucleotide
  modified_base 70: mod_base = OTHER; note = 2'-O-methyl modified nucleotide
  modified_base 75: mod_base = OTHER; note = 2'-O-methyl modified nucleotide
  modified_base 77: mod_base = OTHER; note = 2'-O-methyl modified nucleotide
  modified_base 80: mod_base = OTHER; note = 2'-O-methyl modified nucleotide
  modified_base 86: mod_base = OTHER; note = 2'-O-methyl modified nucleotide
  modified_base 87: mod_base = OTHER; note = 2'-O-methyl modified nucleotide
  modified_base 89: mod_base = OTHER; note = 2'-O-methyl modified nucleotide
  modified_base 90: mod_base = OTHER; note = 2'-O-methyl modified nucleotide
  modified_base 91: mod_base = OTHER; note = 2'-O-methyl modified nucleotide
  modified_base 92: mod_base = OTHER; note = 2'-O-methyl modified nucleotide
  modified_base 99: mod_base = OTHER; note = nucleotide with phosphorothioate linkage
  modified_base 100: mod_base = OTHER; note = 2'-O-methyl modified nucleotide with phosphorothioate linkage
  modified_base 101: mod_base = OTHER; note = 2'-O-methyl modified nucleotide

SEQ ID NO: 2522 - RNA, 101 nt, synthetic construct; identical to SEQ ID NO: 1522
  source 1..101: mol_type = other RNA
  modified_base 1: mod_base = OTHER; note = 2'-O-methyl modified nucleotide with phosphorothioate linkage
  modified_base 2: mod_base = OTHER; note = 2'-O-methyl modified nucleotide with phosphorothioate linkage
  modified_base 3: mod_base = OTHER; note = 2'-O-methyl modified nucleotide with phosphorothioate linkage
  modified_base 4: mod_base = OTHER; note = 2'-O-methyl modified nucleotide
  modified_base 5: mod_base = OTHER; note = 2'-O-methyl modified nucleotide
  modified_base 8: mod_base = OTHER; note = 2'-O-methyl modified nucleotide
  modified_base 9: mod_base = OTHER; note = 2'-O-methyl modified nucleotide
  modified_base 11: mod_base = OTHER; note = 2'-O-methyl modified nucleotide
  modified_base 13: mod_base = OTHER; note = 2'-O-methyl modified nucleotide
  modified_base 18: mod_base = OTHER; note = 2'-O-methyl modified nucleotide
  modified_base 22: mod_base = OTHER; note = 2'-O-methyl modified nucleotide
  modified_base 25: mod_base = OTHER; note = 2'-O-methyl modified nucleotide
  modified_base 29: mod_base = OTHER; note = 2'-O-methyl modified nucleotide
  modified_base 30: mod_base = OTHER; note = 2'-O-methyl modified nucleotide
  modified_base 31: mod_base = OTHER; note = 2'-O-methyl modified nucleotide
  modified_base 32: mod_base = OTHER; note = 2'-O-methyl modified nucleotide
  modified_base 37: mod_base = OTHER; note = 2'-O-methyl modified nucleotide
  modified_base 38: mod_base = OTHER; note = 2'-O-methyl modified nucleotide
  modified_base 39: mod_base = OTHER; note = 2'-O-methyl modified nucleotide
  modified_base 40: mod_base = OTHER; note = 2'-O-methyl modified nucleotide
  modified_base 41: mod_base = OTHER; note = 2'-O-methyl modified nucleotide
  modified_base 42: mod_base = OTHER; note = 2'-O-methyl modified nucleotide
  modified_base 43: mod_base = OTHER; note = 2'-O-methyl modified nucleotide
  modified_base 47: mod_base = OTHER; note = 2'-O-methyl modified nucleotide
  modified_base 48: mod_base = OTHER; note = 2'-O-methyl modified nucleotide
  modified_base 51: mod_base = OTHER; note = 2'-O-methyl modified nucleotide
  modified_base 54: mod_base = OTHER; note = nucleotide with phosphorothioate linkage
  modified_base 58: mod_base = OTHER; note = 2'-O-methyl modified nucleotide
  modified_base 59: mod_base = OTHER; note = 2'-O-methyl modified nucleotide
  modified_base 61: mod_base = OTHER; note = 2'-O-methyl modified nucleotide
  modified_base 62: mod_base = OTHER; note = 2'-O-methyl modified nucleotide
  modified_base 63: mod_base = OTHER; note = 2'-O-methyl modified nucleotide
  modified_base 64: mod_base = OTHER; note = 2'-O-methyl modified nucleotide
  modified_base 65: mod_base = OTHER; note = 2'-O-methyl modified nucleotide
  modified_base 66: mod_base = OTHER; note = 2'-O-methyl modified nucleotide
  modified_base 67: mod_base = OTHER; note = 2'-O-methyl modified nucleotide
  modified_base 68: mod_base = OTHER; note = 2'-O-methyl modified nucleotide
  modified_base 69: mod_base = OTHER; note = 2'-O-methyl modified nucleotide
  modified_base 70: mod_base = OTHER; note = 2'-O-methyl modified nucleotide
  modified_base 75: mod_base = OTHER; note = 2'-O-methyl modified nucleotide
  modified_base 77: mod_base = OTHER; note = 2'-O-methyl modified nucleotide
  modified_base 80: mod_base = OTHER; note = 2'-O-methyl modified nucleotide
  modified_base 86: mod_base = OTHER; note = 2'-O-methyl modified nucleotide
  modified_base 87: mod_base = OTHER; note = 2'-O-methyl modified nucleotide
  modified_base 89: mod_base = OTHER; note = 2'-O-methyl modified nucleotide
  modified_base 90: mod_base = OTHER; note = 2'-O-methyl modified nucleotide
  modified_base 91: mod_base = OTHER; note = 2'-O-methyl modified nucleotide
  modified_base 92: mod_base = OTHER; note = 2'-O-methyl modified nucleotide
  modified_base 99: mod_base = OTHER; note = nucleotide with phosphorothioate linkage
  modified_base 100: mod_base = OTHER; note = 2'-O-methyl modified nucleotide with phosphorothioate linkage
  modified_base 101: mod_base = OTHER; note = 2'-O-methyl modified nucleotide

SEQ ID NO: 2523 - RNA, 101 nt, synthetic construct; identical to SEQ ID NO: 1523
  source 1..101: mol_type = other RNA
  modified_base 1: mod_base = OTHER; note = 2'-O-methyl modified nucleotide with phosphorothioate linkage
  modified_base 2: mod_base = OTHER; note = 2'-O-methyl modified nucleotide with phosphorothioate linkage
  modified_base 3: mod_base = OTHER; note = 2'-O-methyl modified nucleotide with phosphorothioate linkage
  modified_base 4: mod_base = OTHER; note = 2'-O-methyl modified nucleotide
  modified_base 5: mod_base = OTHER; note = 2'-O-methyl modified nucleotide
  modified_base 8: mod_base = OTHER; note = 2'-O-methyl modified nucleotide
  modified_base 9: mod_base = OTHER; note = 2'-O-methyl modified nucleotide
  modified_base 11: mod_base = OTHER; note = 2'-O-methyl modified nucleotide
  modified_base 13: mod_base = OTHER; note = 2'-O-methyl modified nucleotide
  modified_base 18: mod_base = OTHER; note = 2'-O-methyl modified nucleotide
  modified_base 22: mod_base = OTHER; note = 2'-O-methyl modified nucleotide
  modified_base 25: mod_base = OTHER; note = 2'-O-methyl modified nucleotide
  modified_base 29: mod_base = OTHER; note = 2'-O-methyl modified nucleotide
  modified_base 30: mod_base = OTHER; note = 2'-O-methyl modified nucleotide
  modified_base 31: mod_base = OTHER; note = 2'-O-methyl modified nucleotide
  modified_base 32: mod_base = OTHER; note = 2'-O-methyl modified nucleotide
  modified_base 37: mod_base = OTHER; note = 2'-O-methyl modified nucleotide
  modified_base 38: mod_base = OTHER; note = 2'-O-methyl modified nucleotide
  modified_base 39: mod_base = OTHER; note = 2'-O-methyl modified nucleotide
  modified_base 40: mod_base = OTHER; note = 2'-O-methyl modified nucleotide
  modified_base 41: mod_base = OTHER; note = 2'-O-methyl modified nucleotide
  modified_base 42: mod_base = OTHER; note = 2'-O-methyl modified nucleotide
  modified_base 43: mod_base = OTHER; note = 2'-O-methyl modified nucleotide
  modified_base 47: mod_base = OTHER; note = 2'-O-methyl modified nucleotide
  modified_base 48: mod_base = OTHER; note = 2'-O-methyl modified nucleotide
  modified_base 51: mod_base = OTHER; note = 2'-O-methyl modified nucleotide
  modified_base 54: mod_base = OTHER; note = nucleotide with phosphorothioate linkage
  modified_base 58: mod_base = OTHER; note = 2'-O-methyl modified nucleotide
  modified_base 59: mod_base = OTHER; note = 2'-O-methyl modified nucleotide
  modified_base 61: mod_base = OTHER; note = 2'-O-methyl modified nucleotide
  modified_base 62: mod_base = OTHER; note = 2'-O-methyl modified nucleotide
  modified_base 63: mod_base = OTHER; note = 2'-O-methyl modified nucleotide
  modified_base 64: mod_base = OTHER; note = 2'-O-methyl modified nucleotide
  modified_base 65: mod_base = OTHER; note = 2'-O-methyl modified nucleotide
  modified_base 66: mod_base = OTHER; note = 2'-O-methyl modified nucleotide
  modified_base 67: mod_base = OTHER; note = 2'-O-methyl modified nucleotide
  modified_base 68: mod_base = OTHER; note = 2'-O-methyl modified nucleotide
  modified_base 69: mod_base = OTHER; note = 2'-O-methyl modified nucleotide
  modified_base 70: mod_base = OTHER; note = 2'-O-methyl modified nucleotide
  modified_base 75: mod_base = OTHER; note = 2'-O-methyl modified nucleotide
  modified_base 77: mod_base = OTHER; note = 2'-O-methyl modified nucleotide
  modified_base 80: mod_base = OTHER; note = 2'-O-methyl modified nucleotide
  modified_base 86: mod_base = OTHER; note = 2'-O-methyl modified nucleotide
  modified_base 87: mod_base = OTHER; note = 2'-O-methyl modified nucleotide
  modified_base 89: mod_base = OTHER; note = 2'-O-methyl modified nucleotide
  modified_base 90: mod_base = OTHER; note = 2'-O-methyl modified nucleotide
  modified_base 91: mod_base = OTHER; note = 2'-O-methyl modified nucleotide
  modified_base 92: mod_base = OTHER; note = 2'-O-methyl modified nucleotide
  modified_base 99: mod_base = OTHER; note = nucleotide with phosphorothioate linkage
  modified_base 100: mod_base = OTHER; note = 2'-O-methyl modified nucleotide with phosphorothioate linkage
  modified_base 101: mod_base = OTHER; note = 2'-O-methyl modified nucleotide

SEQ ID NO: 2524 - RNA, 101 nt, synthetic construct; identical to SEQ ID NO: 1524
  source 1..101: mol_type = other RNA
  modified_base 1: mod_base = OTHER; note = 2'-O-methyl modified nucleotide with phosphorothioate linkage
  modified_base 2: mod_base = OTHER; note = 2'-O-methyl modified nucleotide with phosphorothioate linkage
  modified_base 3: mod_base = OTHER; note = 2'-O-methyl modified nucleotide with phosphorothioate linkage
  modified_base 4: mod_base = OTHER; note = 2'-O-methyl modified nucleotide
  modified_base 5: mod_base = OTHER; note = 2'-O-methyl modified nucleotide
  modified_base 8: mod_base = OTHER; note = 2'-O-methyl modified nucleotide
  modified_base 9: mod_base = OTHER; note = 2'-O-methyl modified nucleotide
  modified_base 11: mod_base = OTHER; note = 2'-O-methyl modified nucleotide
  modified_base 13: mod_base = OTHER; note = 2'-O-methyl modified nucleotide
  modified_base 18: mod_base = OTHER; note = 2'-O-methyl modified nucleotide
  modified_base 22: mod_base = OTHER; note = 2'-O-methyl modified nucleotide
  modified_base 25: mod_base = OTHER; note = 2'-O-methyl modified nucleotide
  modified_base 29: mod_base = OTHER; note = 2'-O-methyl modified nucleotide
  modified_base 30: mod_base = OTHER; note = 2'-O-methyl modified nucleotide
  modified_base 31: mod_base = OTHER; note = 2'-O-methyl modified nucleotide
  modified_base 32: mod_base = OTHER; note = 2'-O-methyl modified nucleotide
  modified_base 37: mod_base = OTHER; note = 2'-O-methyl modified nucleotide
  modified_base 38: mod_base = OTHER; note = 2'-O-methyl modified nucleotide
  modified_base 39: mod_base = OTHER; note = 2'-O-methyl modified nucleotide
  modified_base 40: mod_base = OTHER; note = 2'-O-methyl modified nucleotide
  modified_base 41: mod_base = OTHER; note = 2'-O-methyl modified nucleotide
  modified_base 42: mod_base = OTHER; note = 2'-O-methyl modified nucleotide
  modified_base 43: mod_base = OTHER; note = 2'-O-methyl modified nucleotide
  modified_base 47: mod_base = OTHER; note = 2'-O-methyl modified nucleotide
  modified_base 48: mod_base = OTHER; note = 2'-O-methyl modified nucleotide
  modified_base 51: mod_base = OTHER; note = 2'-O-methyl modified nucleotide
  modified_base 54: mod_base = OTHER; note = nucleotide with phosphorothioate linkage
  modified_base 58: mod_base = OTHER; note = 2'-O-methyl modified nucleotide
  modified_base 59: mod_base = OTHER; note = 2'-O-methyl modified nucleotide
  modified_base 61: mod_base = OTHER; note = 2'-O-methyl modified nucleotide
  modified_base 62: mod_base = OTHER; note = 2'-O-methyl modified nucleotide
  modified_base 63: mod_base = OTHER; note = 2'-O-methyl modified nucleotide
  modified_base 64: mod_base = OTHER; note = 2'-O-methyl modified nucleotide
  modified_base 65: mod_base = OTHER; note = 2'-O-methyl modified nucleotide
  modified_base 66: mod_base = OTHER; note = 2'-O-methyl modified nucleotide
  modified_base 67: mod_base = OTHER; note = 2'-O-methyl modified nucleotide
  modified_base 68: mod_base = OTHER; note = 2'-O-methyl modified nucleotide
  modified_base 69: mod_base = OTHER; note = 2'-O-methyl modified nucleotide
  modified_base 70: mod_base = OTHER; note = 2'-O-methyl modified nucleotide
  modified_base 75: mod_base = OTHER; note = 2'-O-methyl modified nucleotide
  modified_base 77: mod_base = OTHER; note = 2'-O-methyl modified nucleotide
  modified_base 80: mod_base = OTHER; note = 2'-O-methyl modified nucleotide
  modified_base 86: mod_base = OTHER; note = 2'-O-methyl modified nucleotide
  modified_base 87: mod_base = OTHER; note = 2'-O-methyl modified nucleotide
  modified_base 89: mod_base = OTHER; note = 2'-O-methyl modified nucleotide
  modified_base 90: mod_base = OTHER; note = 2'-O-methyl modified nucleotide
  modified_base 91: mod_base = OTHER; note = 2'-O-methyl modified nucleotide
  modified_base 92: mod_base = OTHER; note = 2'-O-methyl modified nucleotide
  modified_base 99: mod_base = OTHER; note = nucleotide with phosphorothioate linkage
  modified_base 100: mod_base = OTHER; note = 2'-O-methyl modified nucleotide with phosphorothioate linkage
  modified_base 101: mod_base = OTHER; note = 2'-O-methyl modified nucleotide

SEQ ID NO: 2525 - RNA, 101 nt, synthetic construct; identical to SEQ ID NO: 1525
  source 1..101: mol_type = other RNA
  modified_base 1: mod_base = OTHER; note = 2'-O-methyl modified nucleotide with phosphorothioate linkage
  modified_base 2: mod_base = OTHER; note = 2'-O-methyl modified nucleotide with phosphorothioate linkage
  modified_base 3: mod_base = OTHER; note = 2'-O-methyl modified nucleotide with phosphorothioate linkage
  modified_base 4: mod_base = OTHER; note = 2'-O-methyl modified nucleotide
  modified_base 5: mod_base = OTHER; note = 2'-O-methyl modified nucleotide
  modified_base 8: mod_base = OTHER; note = 2'-O-methyl modified nucleotide
  modified_base 9: mod_base = OTHER; note = 2'-O-methyl modified nucleotide
  modified_base 11: mod_base = OTHER; note = 2'-O-methyl modified nucleotide
  modified_base 13: mod_base = OTHER; note = 2'-O-methyl modified nucleotide
  modified_base 18: mod_base = OTHER; note = 2'-O-methyl modified nucleotide
  modified_base 22: mod_base = OTHER; note = 2'-O-methyl modified nucleotide
  modified_base 25: mod_base = OTHER; note = 2'-O-methyl modified nucleotide
  modified_base 29: mod_base = OTHER; note = 2'-O-methyl modified nucleotide
  modified_base 30: mod_base = OTHER; note = 2'-O-methyl modified nucleotide
  modified_base 31: mod_base = OTHER; note = 2'-O-methyl modified nucleotide
  modified_base 32: mod_base = OTHER; note = 2'-O-methyl modified nucleotide
  modified_base 37: mod_base = OTHER; note = 2'-O-methyl modified nucleotide
  modified_base 38: mod_base = OTHER; note = 2'-O-methyl modified nucleotide
  modified_base 39: mod_base = OTHER; note = 2'-O-methyl modified nucleotide
  modified_base 40: mod_base = OTHER; note = 2'-O-methyl modified nucleotide
  modified_base 41: mod_base = OTHER; note = 2'-O-methyl modified nucleotide
  modified_base 42: mod_base = OTHER; note = 2'-O-methyl modified nucleotide
  modified_base 43: mod_base = OTHER; note = 2'-O-methyl modified nucleotide
  modified_base 47: mod_base = OTHER; note = 2'-O-methyl modified nucleotide
  modified_base 48: mod_base = OTHER; note = 2'-O-methyl modified nucleotide
  modified_base 51: mod_base = OTHER; note = 2'-O-methyl modified nucleotide
  modified_base 54: mod_base = OTHER; note = nucleotide with phosphorothioate linkage
  modified_base 58: mod_base = OTHER; note = 2'-O-methyl modified nucleotide
  modified_base 59: mod_base = OTHER; note = 2'-O-methyl modified nucleotide
  modified_base 61: mod_base = OTHER; note = 2'-O-methyl modified nucleotide
  modified_base 62: mod_base = OTHER; note = 2'-O-methyl modified nucleotide
  modified_base 63: mod_base = OTHER; note = 2'-O-methyl modified nucleotide
  modified_base 64: mod_base = OTHER; note = 2'-O-methyl modified nucleotide
  modified_base 65: mod_base = OTHER; note = 2'-O-methyl modified nucleotide
  modified_base 66: mod_base = OTHER; note = 2'-O-methyl modified nucleotide
  modified_base 67: mod_base = OTHER; note = 2'-O-methyl modified nucleotide
  modified_base 68: mod_base = OTHER; note = 2'-O-methyl modified nucleotide
  modified_base 69: mod_base = OTHER; note = 2'-O-methyl modified nucleotide
  modified_base 70: mod_base = OTHER; note = 2'-O-methyl modified nucleotide
  modified_base 75: mod_base = OTHER; note = 2'-O-methyl modified nucleotide
  modified_base 77: mod_base = OTHER; note = 2'-O-methyl modified nucleotide
  modified_base 80: mod_base = OTHER; note = 2'-O-methyl modified nucleotide
  modified_base 86: mod_base = OTHER; note = 2'-O-methyl modified nucleotide
  modified_base 87: mod_base = OTHER; note = 2'-O-methyl modified nucleotide
  modified_base 89: mod_base = OTHER; note = 2'-O-methyl modified nucleotide
  modified_base 90: mod_base = OTHER; note = 2'-O-methyl modified nucleotide
  modified_base 91: mod_base = OTHER; note = 2'-O-methyl modified nucleotide
  modified_base 92: mod_base = OTHER; note = 2'-O-methyl modified nucleotide
  modified_base 99: mod_base = OTHER; note = nucleotide with phosphorothioate linkage
  modified_base 100: mod_base = OTHER; note = 2'-O-methyl modified nucleotide with phosphorothioate linkage
  modified_base 101: mod_base = OTHER; note = 2'-O-methyl modified nucleotide

SEQ ID NO: 2526 - RNA, 101 nt, synthetic construct; identical to SEQ ID NO: 1526
  source 1..101: mol_type = other RNA
  modified_base 1: mod_base = OTHER; note = 2'-O-methyl modified nucleotide with phosphorothioate linkage
  modified_base 2: mod_base = OTHER; note = 2'-O-methyl modified nucleotide with phosphorothioate linkage
  modified_base 3: mod_base = OTHER; note = 2'-O-methyl modified nucleotide with phosphorothioate linkage
  modified_base 4: mod_base = OTHER; note = 2'-O-methyl modified nucleotide
  modified_base 5: mod_base = OTHER; note = 2'-O-methyl modified nucleotide
  modified_base 8: mod_base = OTHER; note = 2'-O-methyl modified nucleotide
  modified_base 9: mod_base = OTHER; note = 2'-O-methyl modified nucleotide
  modified_base 11: mod_base = OTHER; note = 2'-O-methyl modified nucleotide
  modified_base 13: mod_base = OTHER; note = 2'-O-methyl modified nucleotide
  modified_base 18: mod_base = OTHER; note = 2'-O-methyl modified nucleotide
  modified_base 22: mod_base = OTHER; note = 2'-O-methyl modified nucleotide
  modified_base 25: mod_base = OTHER; note = 2'-O-methyl modified nucleotide
  modified_base 29: mod_base = OTHER; note = 2'-O-methyl modified nucleotide
  modified_base 30: mod_base = OTHER; note = 2'-O-methyl modified nucleotide
  modified_base 31: mod_base = OTHER; note = 2'-O-methyl modified nucleotide
  modified_base 32: mod_base = OTHER; note = 2'-O-methyl modified nucleotide
  modified_base 37: mod_base = OTHER; note = 2'-O-methyl modified nucleotide
  modified_base 38: mod_base = OTHER; note = 2'-O-methyl modified nucleotide
  modified_base 39: mod_base = OTHER; note = 2'-O-methyl modified nucleotide
  modified_base 40: mod_base = OTHER; note = 2'-O-methyl modified nucleotide
  modified_base 41: mod_base = OTHER; note = 2'-O-methyl modified nucleotide
  modified_base 42: mod_base = OTHER; note = 2'-O-methyl modified nucleotide
  modified_base 43: mod_base = OTHER; note = 2'-O-methyl modified nucleotide
  modified_base 47: mod_base = OTHER; note = 2'-O-methyl modified nucleotide
  modified_base 48: mod_base = OTHER; note = 2'-O-methyl modified nucleotide
  modified_base 51: mod_base = OTHER; note = 2'-O-methyl modified nucleotide
  modified_base 54: mod_base = OTHER; note = nucleotide with phosphorothioate linkage
  modified_base 58: mod_base = OTHER; note = 2'-O-methyl modified nucleotide
  modified_base 59: mod_base = OTHER; note = 2'-O-methyl modified nucleotide
  modified_base 61: mod_base = OTHER; note = 2'-O-methyl modified nucleotide
  modified_base 62: mod_base = OTHER; note = 2'-O-methyl modified nucleotide
  modified_base 63: mod_base = OTHER; note = 2'-O-methyl modified nucleotide
  modified_base 64: mod_base = OTHER; note = 2'-O-methyl modified nucleotide
  modified_base 65: mod_base = OTHER; note = 2'-O-methyl modified nucleotide
  modified_base 66: mod_base = OTHER; note = 2'-O-methyl modified nucleotide
  modified_base 67: mod_base = OTHER; note = 2'-O-methyl modified nucleotide
  modified_base 68: mod_base = OTHER; note = 2'-O-methyl modified nucleotide
  modified_base 69: mod_base = OTHER; note = 2'-O-methyl modified nucleotide
  modified_base 70: mod_base = OTHER; note = 2'-O-methyl modified nucleotide
  modified_base 75: mod_base = OTHER; note = 2'-O-methyl modified nucleotide
  modified_base 77: mod_base = OTHER; note = 2'-O-methyl modified nucleotide
  modified_base 80: mod_base = OTHER; note = 2'-O-methyl modified nucleotide
  modified_base 86: mod_base = OTHER; note = 2'-O-methyl modified nucleotide
  modified_base 87: mod_base = OTHER; note = 2'-O-methyl modified nucleotide
  modified_base 89: mod_base = OTHER; note = 2'-O-methyl modified nucleotide
  modified_base 90: mod_base = OTHER; note = 2'-O-methyl modified nucleotide
  modified_base 91: mod_base = OTHER; note = 2'-O-methyl modified nucleotide
  modified_base 92: mod_base = OTHER; note = 2'-O-methyl modified nucleotide
  modified_base 99: mod_base = OTHER; note = nucleotide with phosphorothioate linkage
  modified_base 100: mod_base = OTHER; note = 2'-O-methyl modified nucleotide with phosphorothioate linkage
  modified_base 101: mod_base = OTHER; note = 2'-O-methyl modified nucleotide

SEQ ID NO: 2527 - RNA, 101 nt, synthetic construct; identical to SEQ ID NO: 1527
  source 1..101: mol_type = other RNA
  modified_base 1: mod_base = OTHER; note = 2'-O-methyl modified nucleotide with phosphorothioate linkage
  modified_base 2: mod_base = OTHER; note = 2'-O-methyl modified nucleotide with phosphorothioate linkage
  modified_base 3: mod_base = OTHER; note = 2'-O-methyl modified nucleotide with phosphorothioate linkage
  modified_base 4: mod_base = OTHER; note = 2'-O-methyl modified nucleotide
  modified_base 5: mod_base = OTHER; note = 2'-O-methyl modified nucleotide
  modified_base 8: mod_base = OTHER; note = 2'-O-methyl modified nucleotide
  modified_base 9: mod_base = OTHER; note = 2'-O-methyl modified nucleotide
  modified_base 11: mod_base = OTHER; note = 2'-O-methyl modified nucleotide
  modified_base 13: mod_base = OTHER; note = 2'-O-methyl modified nucleotide
  modified_base 18: mod_base = OTHER; note = 2'-O-methyl modified nucleotide
  modified_base 22: mod_base = OTHER; note = 2'-O-methyl modified nucleotide
  modified_base 25: mod_base = OTHER; note = 2'-O-methyl modified nucleotide
  modified_base 29: mod_base = OTHER; note = 2'-O-methyl modified nucleotide
  modified_base 30: mod_base = OTHER; note = 2'-O-methyl modified nucleotide
  modified_base 31: mod_base = OTHER; note = 2'-O-methyl modified nucleotide
  modified_base 32: mod_base = OTHER; note = 2'-O-methyl modified nucleotide
  modified_base 37: mod_base = OTHER; note = 2'-O-methyl modified nucleotide
  modified_base 38: mod_base = OTHER; note = 2'-O-methyl modified nucleotide
  modified_base 39: mod_base = OTHER; note = 2'-O-methyl modified nucleotide
  modified_base 40: mod_base = OTHER; note = 2'-O-methyl modified nucleotide
  modified_base 41: mod_base = OTHER; note = 2'-O-methyl modified nucleotide
  modified_base 42: mod_base = OTHER; note = 2'-O-methyl modified nucleotide
  modified_base 43: mod_base = OTHER; note = 2'-O-methyl modified nucleotide
  modified_base 47: mod_base = OTHER; note = 2'-O-methyl modified nucleotide
  modified_base 48: mod_base = OTHER; note = 2'-O-methyl modified nucleotide
  modified_base 51: mod_base = OTHER; note = 2'-O-methyl modified nucleotide
  modified_base 54: mod_base = OTHER; note = nucleotide with phosphorothioate linkage
  modified_base 58: mod_base = OTHER; note = 2'-O-methyl modified nucleotide
  modified_base 59: mod_base = OTHER; note = 2'-O-methyl modified nucleotide
  modified_base 61: mod_base = OTHER; note = 2'-O-methyl modified nucleotide
  modified_base 62: mod_base = OTHER; note = 2'-O-methyl modified nucleotide
  modified_base 63: mod_base = OTHER; note = 2'-O-methyl modified nucleotide
  modified_base 64: mod_base = OTHER; note = 2'-O-methyl modified nucleotide
  modified_base 65: mod_base = OTHER; note = 2'-O-methyl modified nucleotide
  modified_base 66: mod_base = OTHER; note = 2'-O-methyl modified nucleotide
  modified_base 67: mod_base = OTHER; note = 2'-O-methyl modified nucleotide
  modified_base 68: mod_base = OTHER; note = 2'-O-methyl modified nucleotide
  modified_base 69: mod_base = OTHER; note = 2'-O-methyl modified nucleotide
  modified_base 70: mod_base = OTHER; note = 2'-O-methyl modified nucleotide
  modified_base 75: mod_base = OTHER; note = 2'-O-methyl modified nucleotide
  modified_base 77: mod_base = OTHER; note = 2'-O-methyl modified nucleotide
  modified_base 80: mod_base = OTHER; note = 2'-O-methyl modified nucleotide
  modified_base 86: mod_base = OTHER; note = 2'-O-methyl modified nucleotide
  modified_base 87: mod_base = OTHER; note = 2'-O-methyl modified nucleotide
  modified_base 89: mod_base = OTHER; note = 2'-O-methyl modified nucleotide
  modified_base 90: mod_base = OTHER; note = 2'-O-methyl modified nucleotide
  modified_base 91: mod_base = OTHER; note = 2'-O-methyl modified nucleotide
  modified_base 92: mod_base = OTHER; note = 2'-O-methyl modified nucleotide
  modified_base 99: mod_base = OTHER; note = nucleotide with phosphorothioate linkage
  modified_base 100: mod_base = OTHER; note = 2'-O-methyl modified nucleotide with phosphorothioate linkage
  modified_base 101: mod_base = OTHER; note = 2'-O-methyl modified nucleotide

SEQ ID NO: 2528 - RNA, 101 nt, synthetic construct; identical to SEQ ID NO: 1528
  source 1..101: mol_type = other RNA
  modified_base 1: mod_base = OTHER; note = 2'-O-methyl modified nucleotide with phosphorothioate linkage
  modified_base 2: mod_base = OTHER; note = 2'-O-methyl modified nucleotide with phosphorothioate linkage
  modified_base 3: mod_base = OTHER; note = 2'-O-methyl modified nucleotide with phosphorothioate linkage
  modified_base 4: mod_base = OTHER; note = 2'-O-methyl modified nucleotide
  modified_base 5: mod_base = OTHER; note = 2'-O-methyl modified nucleotide
  modified_base 8: mod_base = OTHER; note = 2'-O-methyl modified nucleotide
  modified_base 9: mod_base = OTHER; note = 2'-O-methyl modified nucleotide
  modified_base 11: mod_base = OTHER; note = 2'-O-methyl modified nucleotide
  modified_base 13: mod_base = OTHER; note = 2'-O-methyl modified nucleotide
  modified_base 18: mod_base = OTHER; note = 2'-O-methyl modified nucleotide
  modified_base 22: mod_base = OTHER; note = 2'-O-methyl modified nucleotide
  modified_base 25: mod_base = OTHER; note = 2'-O-methyl modified nucleotide
  modified_base 29: mod_base = OTHER; note = 2'-O-methyl modified nucleotide
  modified_base 30: mod_base = OTHER; note = 2'-O-methyl modified nucleotide
  modified_base 31: mod_base = OTHER; note = 2'-O-methyl modified nucleotide
  modified_base 32: mod_base = OTHER; note = 2'-O-methyl modified nucleotide
  modified_base 37: mod_base = OTHER; note = 2'-O-methyl modified nucleotide
  modified_base 38: mod_base = OTHER; note = 2'-O-methyl modified nucleotide
  modified_base 39: mod_base = OTHER; note = 2'-O-methyl modified nucleotide
  modified_base 40: mod_base = OTHER; note = 2'-O-methyl modified nucleotide
  modified_base 41: mod_base = OTHER; note = 2'-O-methyl modified nucleotide
  modified_base 42: mod_base = OTHER; note = 2'-O-methyl modified nucleotide
  modified_base 43: mod_base = OTHER; note = 2'-O-methyl modified nucleotide
  modified_base 47: mod_base = OTHER; note = 2'-O-methyl modified nucleotide
  modified_base 48: mod_base = OTHER; note = 2'-O-methyl modified nucleotide
  modified_base 51: mod_base = OTHER; note = 2'-O-methyl modified nucleotide
  modified_base 54: mod_base = OTHER; note = nucleotide with phosphorothioate linkage
  modified_base 58: mod_base = OTHER; note = 2'-O-methyl modified nucleotide
  modified_base 59: mod_base = OTHER; note = 2'-O-methyl modified nucleotide
  modified_base 61: mod_base = OTHER; note = 2'-O-methyl modified nucleotide
  modified_base 62: mod_base = OTHER; note = 2'-O-methyl modified nucleotide
  modified_base 63: mod_base = OTHER; note = 2'-O-methyl modified nucleotide
  modified_base 64: mod_base = OTHER; note = 2'-O-methyl modified nucleotide
  modified_base 65: mod_base = OTHER; note = 2'-O-methyl modified nucleotide
  modified_base 66: mod_base = OTHER; note = 2'-O-methyl modified nucleotide
  modified_base 67: mod_base = OTHER; note = 2'-O-methyl modified nucleotide
  modified_base 68: mod_base = OTHER; note = 2'-O-methyl modified nucleotide
  modified_base 69: mod_base = OTHER; note = 2'-O-methyl modified nucleotide
  modified_base 70: mod_base = OTHER; note = 2'-O-methyl modified nucleotide
  modified_base 75: mod_base = OTHER; note = 2'-O-methyl modified nucleotide
  modified_base 77: mod_base = OTHER; note = 2'-O-methyl modified nucleotide
  modified_base 80: mod_base = OTHER; note = 2'-O-methyl modified nucleotide
  modified_base 86: mod_base = OTHER; note = 2'-O-methyl modified nucleotide
  modified_base 87: mod_base = OTHER; note = 2'-O-methyl modified nucleotide
  modified_base 89: mod_base = OTHER; note = 2'-O-methyl modified nucleotide
  modified_base 90: mod_base = OTHER; note = 2'-O-methyl modified nucleotide
  modified_base 91: mod_base = OTHER; note = 2'-O-methyl modified nucleotide
  modified_base 92: mod_base = OTHER; note = 2'-O-methyl modified nucleotide
  modified_base 99: mod_base = OTHER; note = nucleotide with phosphorothioate linkage
  modified_base 100: mod_base = OTHER; note = 2'-O-methyl modified nucleotide with phosphorothioate linkage
  modified_base 101: mod_base = OTHER; note = 2'-O-methyl modified nucleotide

SEQ ID NO: 2529 - RNA, 101 nt, synthetic construct; identical to SEQ ID NO: 1529
  source 1..101: mol_type = other RNA
  modified_base 1: mod_base = OTHER; note = 2'-O-methyl modified nucleotide with phosphorothioate linkage
  modified_base 2: mod_base = OTHER; note = 2'-O-methyl modified nucleotide with phosphorothioate linkage
  modified_base 3: mod_base = OTHER; note = 2'-O-methyl modified nucleotide with phosphorothioate linkage
  modified_base 4: mod_base = OTHER; note = 2'-O-methyl modified nucleotide
  modified_base 5: mod_base = OTHER; note = 2'-O-methyl modified nucleotide
  modified_base 8: mod_base = OTHER; note = 2'-O-methyl modified nucleotide
  modified_base 9: mod_base = OTHER; note = 2'-O-methyl modified nucleotide
  modified_base 11: mod_base = OTHER; note = 2'-O-methyl modified nucleotide
  modified_base 13: mod_base = OTHER; note = 2'-O-methyl modified nucleotide
  modified_base 18: mod_base = OTHER; note = 2'-O-methyl modified nucleotide
  modified_base 22: mod_base = OTHER; note = 2'-O-methyl modified nucleotide
  modified_base 25: mod_base = OTHER; note = 2'-O-methyl modified nucleotide
  modified_base 29: mod_base = OTHER; note = 2'-O-methyl modified nucleotide
  modified_base 30: mod_base = OTHER; note = 2'-O-methyl modified nucleotide
  modified_base 31: mod_base = OTHER; note = 2'-O-methyl modified nucleotide
  modified_base 32: mod_base = OTHER; note = 2'-O-methyl modified nucleotide
  modified_base 37: mod_base = OTHER; note = 2'-O-methyl modified nucleotide
  modified_base 38: mod_base = OTHER; note = 2'-O-methyl modified nucleotide
  modified_base 39: mod_base = OTHER; note = 2'-O-methyl modified nucleotide
  modified_base 40: mod_base = OTHER; note = 2'-O-methyl modified nucleotide
  modified_base 41: mod_base = OTHER; note = 2'-O-methyl modified nucleotide
  modified_base 42: mod_base = OTHER; note = 2'-O-methyl modified nucleotide
  modified_base 43: mod_base = OTHER; note = 2'-O-methyl modified nucleotide
  modified_base 47: mod_base = OTHER; note = 2'-O-methyl modified nucleotide
  modified_base 48: mod_base = OTHER; note = 2'-O-methyl modified nucleotide
  modified_base 51: mod_base = OTHER; note = 2'-O-methyl modified nucleotide
  modified_base 54: mod_base = OTHER; note = nucleotide with phosphorothioate linkage
  modified_base 58: mod_base = OTHER; note = 2'-O-methyl modified nucleotide
  modified_base 59: mod_base = OTHER; note = 2'-O-methyl modified nucleotide
  modified_base 61: mod_base = OTHER; note = 2'-O-methyl modified nucleotide
  modified_base 62: mod_base = OTHER; note = 2'-O-methyl modified nucleotide
  modified_base 63: mod_base = OTHER; note = 2'-O-methyl modified nucleotide
  modified_base 64: mod_base = OTHER; note = 2'-O-methyl modified nucleotide
  modified_base 65: mod_base = OTHER; note = 2'-O-methyl modified nucleotide
  modified_base 66: mod_base = OTHER; note = 2'-O-methyl modified nucleotide
  modified_base 67: mod_base = OTHER; note = 2'-O-methyl modified nucleotide
  modified_base 68: mod_base = OTHER; note = 2'-O-methyl modified nucleotide
  modified_base 69: mod_base = OTHER; note = 2'-O-methyl modified nucleotide
  modified_base 70: mod_base = OTHER; note = 2'-O-methyl modified nucleotide
  modified_base 75: mod_base = OTHER; note = 2'-O-methyl modified nucleotide
  modified_base 77: mod_base = OTHER; note = 2'-O-methyl modified nucleotide
  modified_base 80: mod_base = OTHER; note = 2'-O-methyl modified nucleotide
  modified_base 86: mod_base = OTHER; note = 2'-O-methyl modified nucleotide
  modified_base 87: mod_base = OTHER; note = 2'-O-methyl modified nucleotide
  modified_base 89: mod_base = OTHER; note = 2'-O-methyl modified nucleotide
  modified_base 90: mod_base = OTHER; note = 2'-O-methyl modified nucleotide
  modified_base 91: mod_base = OTHER; note = 2'-O-methyl modified nucleotide
  modified_base 92: mod_base = OTHER; note = 2'-O-methyl modified nucleotide
  modified_base 99: mod_base = OTHER; note = nucleotide with phosphorothioate linkage
  modified_base 100: mod_base = OTHER; note = 2'-O-methyl modified nucleotide with phosphorothioate linkage
  modified_base 101: mod_base = OTHER; note = 2'-O-methyl modified nucleotide

SEQ ID NO: 2530 - RNA, 101 nt, synthetic construct; identical to SEQ ID NO: 1530
  source 1..101: mol_type = other RNA
  modified_base 1: mod_base = OTHER; note = 2'-O-methyl modified nucleotide with phosphorothioate linkage
  modified_base 2: mod_base = OTHER; note = 2'-O-methyl modified nucleotide with phosphorothioate linkage
  modified_base 3: mod_base = OTHER; note = 2'-O-methyl modified nucleotide with phosphorothioate linkage
  modified_base 4: mod_base = OTHER; note = 2'-O-methyl modified nucleotide
  modified_base 5: mod_base = OTHER; note = 2'-O-methyl modified nucleotide
  modified_base 8: mod_base = OTHER; note = 2'-O-methyl modified nucleotide
  modified_base 9: mod_base = OTHER; note = 2'-O-methyl modified nucleotide
  modified_base 11: mod_base = OTHER; note = 2'-O-methyl modified nucleotide
  modified_base 13: mod_base = OTHER; note = 2'-O-methyl modified nucleotide
  modified_base 18: mod_base = OTHER; note = 2'-O-methyl modified nucleotide
  modified_base 22: mod_base = OTHER; note = 2'-O-methyl modified nucleotide
  modified_base 25: mod_base = OTHER; note = 2'-O-methyl modified nucleotide
  modified_base 29: mod_base = OTHER; note = 2'-O-methyl modified nucleotide
  modified_base 30: mod_base = OTHER; note = 2'-O-methyl modified nucleotide
  modified_base 31: mod_base = OTHER; note = 2'-O-methyl modified nucleotide
  modified_base 32: mod_base = OTHER; note = 2'-O-methyl modified nucleotide
  modified_base 37: mod_base = OTHER; note = 2'-O-methyl modified nucleotide
  modified_base 38: mod_base = OTHER; note = 2'-O-methyl modified nucleotide
  modified_base 39: mod_base = OTHER; note = 2'-O-methyl modified nucleotide
  modified_base 40: mod_base = OTHER; note = 2'-O-methyl modified nucleotide
  modified_base 41: mod_base = OTHER; note = 2'-O-methyl modified nucleotide
  modified_base 42: mod_base = OTHER; note = 2'-O-methyl modified nucleotide
  modified_base 43: mod_base = OTHER; note = 2'-O-methyl modified nucleotide
  modified_base 47: mod_base = OTHER; note = 2'-O-methyl modified nucleotide
  modified_base 48: mod_base = OTHER; note = 2'-O-methyl modified nucleotide
  modified_base 51: mod_base = OTHER; note = 2'-O-methyl modified nucleotide
  modified_base 54: mod_base = OTHER; note = nucleotide with phosphorothioate linkage
  modified_base 58: mod_base = OTHER; note = 2'-O-methyl modified nucleotide
  modified_base 59: mod_base = OTHER; note = 2'-O-methyl modified nucleotide
  modified_base 61: mod_base = OTHER; note = 2'-O-methyl modified nucleotide
  modified_base 62: mod_base = OTHER; note = 2'-O-methyl modified nucleotide
  modified_base 63: mod_base = OTHER; note = 2'-O-methyl modified nucleotide
  modified_base 64: mod_base = OTHER; note = 2'-O-methyl modified nucleotide
  modified_base 65: mod_base = OTHER; note = 2'-O-methyl modified nucleotide
  modified_base 66: mod_base = OTHER; note = 2'-O-methyl modified nucleotide
  modified_base 67: mod_base = OTHER; note = 2'-O-methyl modified nucleotide
  modified_base 68: mod_base = OTHER; note = 2'-O-methyl modified nucleotide
  modified_base 69: mod_base = OTHER; note = 2'-O-methyl modified nucleotide
  modified_base 70: mod_base = OTHER; note = 2'-O-methyl modified nucleotide
  modified_base 75: mod_base = OTHER; note = 2'-O-methyl modified nucleotide
  modified_base 77: mod_base = OTHER; note = 2'-O-methyl modified nucleotide
  modified_base 80: mod_base = OTHER; note = 2'-O-methyl modified nucleotide
  modified_base 86: mod_base = OTHER; note = 2'-O-methyl modified nucleotide
  modified_base 87: mod_base = OTHER; note = 2'-O-methyl modified nucleotide
  modified_base 89: mod_base = OTHER; note = 2'-O-methyl modified nucleotide
  modified_base 90: mod_base = OTHER; note = 2'-O-methyl modified nucleotide
  modified_base 91: mod_base = OTHER; note = 2'-O-methyl modified nucleotide
  modified_base 92: mod_base = OTHER; note = 2'-O-methyl modified nucleotide
  modified_base 99: mod_base = OTHER; note = nucleotide with phosphorothioate linkage
  modified_base 100: mod_base = OTHER; note = 2'-O-methyl modified nucleotide with phosphorothioate linkage
  modified_base 101: mod_base = OTHER; note = 2'-O-methyl modified nucleotide

SEQ ID NO: 2531 - RNA, 101 nt, synthetic construct; identical to SEQ ID NO: 1531
  source 1..101: mol_type = other RNA
  modified_base 1: mod_base = OTHER; note = 2'-O-methyl modified nucleotide with phosphorothioate linkage
  modified_base 2: mod_base = OTHER; note = 2'-O-methyl modified nucleotide with phosphorothioate linkage
  modified_base 3: mod_base = OTHER; note = 2'-O-methyl modified nucleotide with phosphorothioate linkage
  modified_base 4: mod_base = OTHER; note = 2'-O-methyl modified nucleotide
  modified_base 5: mod_base = OTHER; note = 2'-O-methyl modified nucleotide
  modified_base 8: mod_base = OTHER; note = 2'-O-methyl modified nucleotide
  modified_base 9: mod_base = OTHER; note = 2'-O-methyl modified nucleotide
  modified_base 11: mod_base = OTHER; note = 2'-O-methyl modified nucleotide
  modified_base 13: mod_base = OTHER; note = 2'-O-methyl modified nucleotide
  modified_base 18: mod_base = OTHER; note = 2'-O-methyl modified nucleotide
  modified_base 22: mod_base = OTHER; note = 2'-O-methyl modified nucleotide
  modified_base 25: mod_base = OTHER; note = 2'-O-methyl modified nucleotide
  modified_base 29: mod_base = OTHER; note = 2'-O-methyl modified nucleotide
  modified_base 30: mod_base = OTHER; note = 2'-O-methyl modified nucleotide
  modified_base 31: mod_base = OTHER; note = 2'-O-methyl modified nucleotide
  modified_base 32: mod_base = OTHER; note = 2'-O-methyl modified nucleotide
  modified_base 37: mod_base = OTHER; note = 2'-O-methyl modified nucleotide
  modified_base 38: mod_base = OTHER; note = 2'-O-methyl modified nucleotide
  modified_base 39: mod_base = OTHER; note = 2'-O-methyl modified nucleotide
  modified_base 40: mod_base = OTHER; note = 2'-O-methyl modified nucleotide
  modified_base 41: mod_base = OTHER; note = 2'-O-methyl modified nucleotide
  modified_base 42: mod_base = OTHER; note = 2'-O-methyl modified nucleotide
  modified_base 43: mod_base = OTHER; note = 2'-O-methyl modified nucleotide
  modified_base 47: mod_base = OTHER; note = 2'-O-methyl modified nucleotide
  modified_base 48: mod_base = OTHER; note = 2'-O-methyl modified nucleotide
  modified_base 51: mod_base = OTHER; note = 2'-O-methyl modified nucleotide
  modified_base 54: mod_base = OTHER; note = nucleotide with phosphorothioate linkage
  modified_base 58: mod_base = OTHER; note = 2'-O-methyl modified nucleotide
  modified_base 59: mod_base = OTHER; note = 2'-O-methyl modified nucleotide
  modified_base 61: mod_base = OTHER; note = 2'-O-methyl modified nucleotide
  modified_base 62: mod_base = OTHER; note = 2'-O-methyl modified nucleotide
  modified_base 63: mod_base = OTHER; note = 2'-O-methyl modified nucleotide
  modified_base 64: mod_base = OTHER; note = 2'-O-methyl modified nucleotide
  modified_base 65: mod_base = OTHER; note = 2'-O-methyl modified nucleotide
  modified_base 66: mod_base = OTHER; note = 2'-O-methyl modified nucleotide
  modified_base 67: mod_base = OTHER; note = 2'-O-methyl modified nucleotide
  modified_base 68: mod_base = OTHER; note = 2'-O-methyl modified nucleotide
  modified_base 69: mod_base = OTHER; note = 2'-O-methyl modified nucleotide
  modified_base 70: mod_base = OTHER; note = 2'-O-methyl modified nucleotide
  modified_base 75: mod_base = OTHER; note = 2'-O-methyl modified nucleotide
  modified_base 77: mod_base = OTHER; note = 2'-O-methyl modified nucleotide
  modified_base 80: mod_base = OTHER; note = 2'-O-methyl modified nucleotide
  modified_base 86: mod_base = OTHER; note = 2'-O-methyl modified nucleotide
  modified_base 87: mod_base = OTHER; note = 2'-O-methyl modified nucleotide
  modified_base 89: mod_base = OTHER; note = 2'-O-methyl modified nucleotide
  modified_base 90: mod_base = OTHER; note = 2'-O-methyl modified nucleotide
  modified_base 91: mod_base = OTHER; note = 2'-O-methyl modified nucleotide
  modified_base 92: mod_base = OTHER; note = 2'-O-methyl modified nucleotide
  modified_base 99: mod_base = OTHER; note = nucleotide with phosphorothioate linkage
  modified_base 100: mod_base = OTHER; note = 2'-O-methyl modified nucleotide with phosphorothioate linkage
  modified_base 101: mod_base = OTHER; note = 2'-O-methyl modified nucleotide

SEQ ID NO: 2532 - RNA, 101 nt, synthetic construct; identical to SEQ ID NO: 1532
  source 1..101: mol_type = other RNA
  modified_base 1: mod_base = OTHER; note = 2'-O-methyl modified nucleotide with phosphorothioate linkage
  modified_base 2: mod_base = OTHER; note = 2'-O-methyl modified nucleotide with phosphorothioate linkage
  modified_base 3: mod_base = OTHER; note = 2'-O-methyl modified nucleotide with phosphorothioate linkage
  modified_base 4: mod_base = OTHER; note = 2'-O-methyl modified nucleotide
  modified_base 5: mod_base = OTHER; note = 2'-O-methyl modified nucleotide
  modified_base 8: mod_base = OTHER; note = 2'-O-methyl modified nucleotide
  modified_base 9: mod_base = OTHER; note = 2'-O-methyl modified nucleotide
  modified_base 11: mod_base = OTHER; note = 2'-O-methyl modified nucleotide
  modified_base 13: mod_base = OTHER; note = 2'-O-methyl modified nucleotide
  modified_base 18: mod_base = OTHER; note = 2'-O-methyl modified nucleotide
  modified_base 22: mod_base = OTHER; note = 2'-O-methyl modified nucleotide
  modified_base 25: mod_base = OTHER; note = 2'-O-methyl modified nucleotide
  modified_base 29: mod_base = OTHER; note = 2'-O-methyl modified nucleotide
  modified_base 30: mod_base = OTHER; note = 2'-O-methyl modified nucleotide
  modified_base 31: mod_base = OTHER; note = 2'-O-methyl modified nucleotide
  modified_base 32: mod_base = OTHER; note = 2'-O-methyl modified nucleotide
  modified_base 37: mod_base = OTHER; note = 2'-O-methyl modified nucleotide
  modified_base 38: mod_base = OTHER; note = 2'-O-methyl modified nucleotide
  modified_base 39: mod_base = OTHER; note = 2'-O-methyl modified nucleotide
  modified_base 40: mod_base = OTHER; note = 2'-O-methyl modified nucleotide
  modified_base 41: mod_base = OTHER; note = 2'-O-methyl modified nucleotide
  modified_base 42: mod_base = OTHER; note = 2'-O-methyl modified nucleotide
  modified_base 43: mod_base = OTHER; note = 2'-O-methyl modified nucleotide
  modified_base 47: mod_base = OTHER; note = 2'-O-methyl modified nucleotide
  modified_base 48: mod_base = OTHER; note = 2'-O-methyl modified nucleotide
  modified_base 51: mod_base = OTHER; note = 2'-O-methyl modified nucleotide
  modified_base 54: mod_base = OTHER; note = nucleotide with phosphorothioate linkage
  modified_base 58: mod_base = OTHER; note = 2'-O-methyl modified nucleotide
  modified_base 59: mod_base = OTHER; note = 2'-O-methyl modified nucleotide
  modified_base 61: mod_base = OTHER; note = 2'-O-methyl modified nucleotide
  modified_base 62: mod_base = OTHER; note = 2'-O-methyl modified nucleotide
  modified_base 63: mod_base = OTHER; note = 2'-O-methyl modified nucleotide
  modified_base 64: mod_base = OTHER; note = 2'-O-methyl modified nucleotide
  modified_base 65: mod_base = OTHER; note = 2'-O-methyl modified nucleotide
  modified_base 66: mod_base = OTHER; note = 2'-O-methyl modified nucleotide
  modified_base 67: mod_base = OTHER; note = 2'-O-methyl modified nucleotide
  modified_base 68: mod_base = OTHER; note = 2'-O-methyl modified nucleotide
  modified_base 69: mod_base = OTHER; note = 2'-O-methyl modified nucleotide
  modified_base 70: mod_base = OTHER; note = 2'-O-methyl modified nucleotide
  modified_base 75: mod_base = OTHER; note = 2'-O-methyl modified nucleotide
  modified_base 77: mod_base = OTHER; note = 2'-O-methyl modified nucleotide
  modified_base 80: mod_base = OTHER; note = 2'-O-methyl modified nucleotide
  modified_base 86: mod_base = OTHER; note = 2'-O-methyl modified nucleotide
  modified_base 87: mod_base = OTHER; note = 2'-O-methyl modified nucleotide
  modified_base 89: mod_base = OTHER; note = 2'-O-methyl modified nucleotide
  modified_base 90: mod_base = OTHER; note = 2'-O-methyl modified nucleotide
  modified_base 91: mod_base = OTHER; note = 2'-O-methyl modified nucleotide
  modified_base 92: mod_base = OTHER; note = 2'-O-methyl modified nucleotide
  modified_base 99: mod_base = OTHER; note = nucleotide with phosphorothioate linkage
  modified_base 100: mod_base = OTHER; note = 2'-O-methyl modified nucleotide with phosphorothioate linkage
  modified_base 101: mod_base = OTHER; note = 2'-O-methyl modified nucleotide

SEQ ID NO: 2533 - RNA, 101 nt, synthetic construct; identical to SEQ ID NO: 1533
  source 1..101: mol_type = other RNA
  modified_base 1: mod_base = OTHER; note = 2'-O-methyl modified nucleotide with phosphorothioate linkage
  modified_base 2: mod_base = OTHER; note = 2'-O-methyl modified nucleotide with phosphorothioate linkage
  modified_base 3: mod_base = OTHER; note = 2'-O-methyl modified nucleotide with phosphorothioate linkage
  modified_base 4: mod_base = OTHER; note = 2'-O-methyl modified nucleotide
  modified_base 5: mod_base = OTHER; note = 2'-O-methyl modified nucleotide
  modified_base 8: mod_base = OTHER; note = 2'-O-methyl modified nucleotide
  modified_base 9: mod_base = OTHER; note = 2'-O-methyl modified nucleotide
  modified_base 11: mod_base = OTHER; note = 2'-O-methyl modified nucleotide
  modified_base 13: mod_base = OTHER; note = 2'-O-methyl modified nucleotide
  modified_base 18: mod_base = OTHER; note = 2'-O-methyl modified nucleotide
  modified_base 22: mod_base = OTHER; note = 2'-O-methyl modified nucleotide
  modified_base 25: mod_base = OTHER; note = 2'-O-methyl modified nucleotide
  modified_base 29: mod_base = OTHER; note = 2'-O-methyl modified nucleotide
  modified_base 30: mod_base = OTHER; note = 2'-O-methyl modified nucleotide
  modified_base 31: mod_base = OTHER; note = 2'-O-methyl modified nucleotide
  modified_base 32: mod_base = OTHER; note = 2'-O-methyl modified nucleotide
  modified_base 37: mod_base = OTHER; note = 2'-O-methyl modified nucleotide
  modified_base 38: mod_base = OTHER; note = 2'-O-methyl modified nucleotide
  modified_base 39: mod_base = OTHER; note = 2'-O-methyl modified nucleotide
  modified_base 40: mod_base = OTHER; note = 2'-O-methyl modified nucleotide
  modified_base 41: mod_base = OTHER; note = 2'-O-methyl modified nucleotide
  modified_base 42: mod_base = OTHER; note = 2'-O-methyl modified nucleotide
  modified_base 43: mod_base = OTHER; note = 2'-O-methyl modified nucleotide
  modified_base 47: mod_base = OTHER; note = 2'-O-methyl modified nucleotide
  modified_base 48: mod_base = OTHER; note = 2'-O-methyl modified nucleotide
  modified_base 51: mod_base = OTHER; note = 2'-O-methyl modified nucleotide
  modified_base 54: mod_base = OTHER; note = nucleotide with phosphorothioate linkage
  modified_base 58: mod_base = OTHER; note = 2'-O-methyl modified nucleotide
  modified_base 59: mod_base = OTHER; note = 2'-O-methyl modified nucleotide
  modified_base 61: mod_base = OTHER; note = 2'-O-methyl modified nucleotide
  modified_base 62: mod_base = OTHER; note = 2'-O-methyl modified nucleotide
  modified_base 63: mod_base = OTHER; note = 2'-O-methyl modified nucleotide
  modified_base 64: mod_base = OTHER; note = 2'-O-methyl modified nucleotide
  modified_base 65: mod_base = OTHER; note = 2'-O-methyl modified nucleotide
  modified_base 66: mod_base = OTHER; note = 2'-O-methyl modified nucleotide
  modified_base 67: mod_base = OTHER; note = 2'-O-methyl modified nucleotide
  modified_base 68: mod_base = OTHER; note = 2'-O-methyl modified nucleotide
  modified_base 69: mod_base = OTHER; note = 2'-O-methyl modified nucleotide
  modified_base 70: mod_base = OTHER; note = 2'-O-methyl modified nucleotide
  modified_base 75: mod_base = OTHER; note = 2'-O-methyl modified nucleotide
  modified_base 77: mod_base = OTHER; note = 2'-O-methyl modified nucleotide
  modified_base 80: mod_base = OTHER; note = 2'-O-methyl modified nucleotide
  modified_base 86: mod_base = OTHER; note = 2'-O-methyl modified nucleotide
  modified_base 87: mod_base = OTHER; note = 2'-O-methyl modified nucleotide
  modified_base 89: mod_base = OTHER; note = 2'-O-methyl modified nucleotide
  modified_base 90: mod_base = OTHER; note = 2'-O-methyl modified nucleotide
  modified_base 91: mod_base = OTHER; note = 2'-O-methyl modified nucleotide
  modified_base 92: mod_base = OTHER; note = 2'-O-methyl modified nucleotide
  modified_base 99: mod_base = OTHER; note = nucleotide with phosphorothioate linkage
  modified_base 100: mod_base = OTHER; note = 2'-O-methyl modified nucleotide with phosphorothioate linkage
  modified_base 101: mod_base = OTHER; note = 2'-O-methyl modified nucleotide

SEQ ID NO: 2534 - RNA, 101 nt, synthetic construct; identical to SEQ ID NO: 1534
  source 1..101: mol_type = other RNA
  modified_base 1: mod_base = OTHER; note = 2'-O-methyl modified nucleotide with phosphorothioate linkage
  modified_base 2: mod_base = OTHER; note = 2'-O-methyl modified nucleotide with phosphorothioate linkage
  modified_base 3: mod_base = OTHER; note = 2'-O-methyl modified nucleotide with phosphorothioate linkage
  modified_base 4: mod_base = OTHER; note = 2'-O-methyl modified nucleotide
  modified_base 5: mod_base = OTHER; note = 2'-O-methyl modified nucleotide
  modified_base 8: mod_base = OTHER; note = 2'-O-methyl modified nucleotide
  modified_base 9: mod_base = OTHER; note = 2'-O-methyl modified nucleotide
  modified_base 11: mod_base = OTHER; note = 2'-O-methyl modified nucleotide
  modified_base 13: mod_base = OTHER; note = 2'-O-methyl modified nucleotide
  modified_base 18: mod_base = OTHER; note = 2'-O-methyl modified nucleotide
  modified_base 22: mod_base = OTHER; note = 2'-O-methyl modified nucleotide
  modified_base 25: mod_base = OTHER; note = 2'-O-methyl modified nucleotide
  modified_base 29: mod_base = OTHER; note = 2'-O-methyl modified nucleotide
  modified_base 30: mod_base = OTHER; note = 2'-O-methyl modified nucleotide
  modified_base 31: mod_base = OTHER; note = 2'-O-methyl modified nucleotide
  modified_base 32: mod_base = OTHER; note = 2'-O-methyl modified nucleotide
  modified_base 37: mod_base = OTHER; note = 2'-O-methyl modified nucleotide
  modified_base 38: mod_base = OTHER; note = 2'-O-methyl modified nucleotide
  modified_base 39: mod_base = OTHER; note = 2'-O-methyl modified nucleotide
  modified_base 40: mod_base = OTHER; note = 2'-O-methyl modified nucleotide
  modified_base 41: mod_base = OTHER; note = 2'-O-methyl modified nucleotide
  modified_base 42: mod_base = OTHER; note = 2'-O-methyl modified nucleotide
  modified_base 43: mod_base = OTHER; note = 2'-O-methyl modified nucleotide
  modified_base 47: mod_base = OTHER; note = 2'-O-methyl modified nucleotide
  modified_base 48: mod_base = OTHER; note = 2'-O-methyl modified nucleotide
  modified_base 51: mod_base = OTHER; note = 2'-O-methyl modified nucleotide
  modified_base 54: mod_base = OTHER; note = nucleotide with phosphorothioate linkage
  modified_base 58: mod_base = OTHER; note = 2'-O-methyl modified nucleotide
  modified_base 59: mod_base = OTHER; note = 2'-O-methyl modified nucleotide
  modified_base 61: mod_base = OTHER; note = 2'-O-methyl modified nucleotide
  modified_base 62: mod_base = OTHER; note = 2'-O-methyl modified nucleotide
  modified_base 63: mod_base = OTHER; note = 2'-O-methyl modified nucleotide
  modified_base 64: mod_base = OTHER; note = 2'-O-methyl modified nucleotide
  modified_base 65: mod_base = OTHER; note = 2'-O-methyl modified nucleotide
  modified_base 66: mod_base = OTHER; note = 2'-O-methyl modified nucleotide
  modified_base 67: mod_base = OTHER; note = 2'-O-methyl modified nucleotide
  modified_base 68: mod_base = OTHER; note = 2'-O-methyl modified nucleotide
  modified_base 69: mod_base = OTHER; note = 2'-O-methyl modified nucleotide
  modified_base 70: mod_base = OTHER; note = 2'-O-methyl modified nucleotide
  modified_base 75: mod_base = OTHER; note = 2'-O-methyl modified nucleotide
  modified_base 77: mod_base = OTHER; note = 2'-O-methyl modified nucleotide
  modified_base 80: mod_base = OTHER; note = 2'-O-methyl modified nucleotide
  modified_base 86: mod_base = OTHER; note = 2'-O-methyl modified nucleotide
  modified_base 87: mod_base = OTHER; note = 2'-O-methyl modified nucleotide
  modified_base 89: mod_base = OTHER; note = 2'-O-methyl modified nucleotide
  modified_base 90: mod_base = OTHER; note = 2'-O-methyl modified nucleotide
  modified_base 91: mod_base = OTHER; note = 2'-O-methyl modified nucleotide
  modified_base 92: mod_base = OTHER; note = 2'-O-methyl modified nucleotide
  modified_base 99: mod_base = OTHER; note = nucleotide with phosphorothioate linkage
  modified_base 100: mod_base = OTHER; note = 2'-O-methyl modified nucleotide with phosphorothioate linkage
  modified_base 101: mod_base = OTHER; note = 2'-O-methyl modified nucleotide

SEQ ID NO: 2535 - RNA, 101 nt, synthetic construct; identical to SEQ ID NO: 1535
  source 1..101: mol_type = other RNA
  modified_base 1: mod_base = OTHER; note = 2'-O-methyl modified nucleotide with phosphorothioate linkage
  modified_base 2: mod_base = OTHER; note = 2'-O-methyl modified nucleotide with phosphorothioate linkage
  modified_base 3: mod_base = OTHER; note = 2'-O-methyl modified nucleotide with phosphorothioate linkage
  modified_base 4: mod_base = OTHER; note = 2'-O-methyl modified nucleotide
  modified_base 5: mod_base = OTHER; note = 2'-O-methyl modified nucleotide
  modified_base 8: mod_base = OTHER; note = 2'-O-methyl modified nucleotide
  modified_base 9: mod_base = OTHER; note = 2'-O-methyl modified nucleotide
  modified_base 11: mod_base = OTHER; note = 2'-O-methyl modified nucleotide
  modified_base 13: mod_base = OTHER; note = 2'-O-methyl modified nucleotide
  modified_base 18: mod_base = OTHER; note = 2'-O-methyl modified nucleotide
  modified_base 22: mod_base = OTHER; note = 2'-O-methyl modified nucleotide
  modified_base 25: mod_base = OTHER; note = 2'-O-methyl modified nucleotide
  modified_base 29: mod_base = OTHER; note = 2'-O-methyl modified nucleotide
  modified_base 30: mod_base = OTHER; note = 2'-O-methyl modified nucleotide
  modified_base 31: mod_base = OTHER; note = 2'-O-methyl modified nucleotide
  modified_base 32: mod_base = OTHER; note = 2'-O-methyl modified nucleotide
  modified_base 37: mod_base = OTHER; note = 2'-O-methyl modified nucleotide
  modified_base 38: mod_base = OTHER; note = 2'-O-methyl modified nucleotide
  modified_base 39: mod_base = OTHER; note = 2'-O-methyl modified nucleotide
  modified_base 40: mod_base = OTHER; note = 2'-O-methyl modified nucleotide
  modified_base 41: mod_base = OTHER; note = 2'-O-methyl modified nucleotide
  modified_base 42: mod_base = OTHER; note = 2'-O-methyl modified nucleotide
  modified_base 43: mod_base = OTHER; note = 2'-O-methyl modified nucleotide
  modified_base 47: mod_base = OTHER; note = 2'-O-methyl modified nucleotide
  modified_base 48: mod_base = OTHER; note = 2'-O-methyl modified nucleotide
  modified_base 51: mod_base = OTHER; note = 2'-O-methyl modified nucleotide
  modified_base 54: mod_base = OTHER; note = nucleotide with phosphorothioate linkage
  modified_base 58: mod_base = OTHER; note = 2'-O-methyl modified nucleotide
  modified_base 59: mod_base = OTHER; note = 2'-O-methyl modified nucleotide
  modified_base 61: mod_base = OTHER; note = 2'-O-methyl modified nucleotide
  modified_base 62: mod_base = OTHER; note = 2'-O-methyl modified nucleotide
  modified_base 63: mod_base = OTHER; note = 2'-O-methyl modified nucleotide
  modified_base 64: mod_base = OTHER; note = 2'-O-methyl modified nucleotide
  modified_base 65: mod_base = OTHER; note = 2'-O-methyl modified nucleotide
  modified_base 66: mod_base = OTHER; note = 2'-O-methyl modified nucleotide
  modified_base 67: mod_base = OTHER; note = 2'-O-methyl modified nucleotide
  modified_base 68: mod_base = OTHER; note = 2'-O-methyl modified nucleotide
  modified_base 69: mod_base = OTHER; note = 2'-O-methyl modified nucleotide
  modified_base 70: mod_base = OTHER; note = 2'-O-methyl modified nucleotide
  modified_base 75: mod_base = OTHER; note = 2'-O-methyl modified nucleotide
  modified_base 77: mod_base = OTHER; note = 2'-O-methyl modified nucleotide
  modified_base 80: mod_base = OTHER; note = 2'-O-methyl modified nucleotide
  modified_base 86: mod_base = OTHER; note = 2'-O-methyl modified nucleotide
  modified_base 87: mod_base = OTHER; note = 2'-O-methyl modified nucleotide
  modified_base 89: mod_base = OTHER; note = 2'-O-methyl modified nucleotide
  modified_base 90: mod_base = OTHER; note = 2'-O-methyl modified nucleotide
  modified_base 91: mod_base = OTHER; note = 2'-O-methyl modified nucleotide
  modified_base 92: mod_base = OTHER; note = 2'-O-methyl modified nucleotide
  modified_base 99: mod_base = OTHER; note = nucleotide with phosphorothioate linkage
  modified_base 100: mod_base = OTHER; note = 2'-O-methyl modified nucleotide with phosphorothioate linkage
  modified_base 101: mod_base = OTHER; note = 2'-O-methyl modified nucleotide

SEQ ID NO: 2536 - RNA, 101 nt, synthetic construct; identical to SEQ ID NO: 1536
  source 1..101: mol_type = other RNA
  modified_base 1: mod_base = OTHER; note = 2'-O-methyl modified nucleotide with phosphorothioate linkage
  modified_base 2: mod_base = OTHER; note = 2'-O-methyl modified nucleotide with phosphorothioate linkage
  modified_base 3: mod_base = OTHER; note = 2'-O-methyl modified nucleotide with phosphorothioate linkage
  modified_base 4: mod_base = OTHER; note = 2'-O-methyl modified nucleotide
  modified_base 5: mod_base = OTHER; note = 2'-O-methyl modified nucleotide
  modified_base 8: mod_base = OTHER; note = 2'-O-methyl modified nucleotide
  modified_base 9: mod_base = OTHER; note = 2'-O-methyl modified nucleotide
  modified_base 11: mod_base = OTHER; note = 2'-O-methyl modified nucleotide
  modified_base 13: mod_base = OTHER; note = 2'-O-methyl modified nucleotide
  modified_base 18: mod_base = OTHER; note = 2'-O-methyl modified nucleotide
  modified_base 22: mod_base = OTHER; note = 2'-O-methyl modified nucleotide
  modified_base 25: mod_base = OTHER; note = 2'-O-methyl modified nucleotide
  modified_base 29: mod_base = OTHER; note = 2'-O-methyl modified nucleotide
  modified_base 30: mod_base = OTHER; note = 2'-O-methyl modified nucleotide
  modified_base 31: mod_base = OTHER; note = 2'-O-methyl modified nucleotide
  modified_base 32: mod_base = OTHER; note = 2'-O-methyl modified nucleotide
  modified_base 37: mod_base = OTHER; note = 2'-O-methyl modified nucleotide
  modified_base 38: mod_base = OTHER; note = 2'-O-methyl modified nucleotide
  modified_base 39: mod_base = OTHER; note = 2'-O-methyl modified nucleotide
  modified_base 40: mod_base = OTHER; note = 2'-O-methyl modified nucleotide
  modified_base 41: mod_base = OTHER; note = 2'-O-methyl modified nucleotide
  modified_base 42: mod_base = OTHER; note = 2'-O-methyl modified nucleotide
  modified_base 43: mod_base = OTHER; note = 2'-O-methyl modified nucleotide
  modified_base 47: mod_base = OTHER; note = 2'-O-methyl modified nucleotide
  modified_base 48: mod_base = OTHER; note = 2'-O-methyl modified nucleotide
  modified_base 51: mod_base = OTHER; note = 2'-O-methyl modified nucleotide
  modified_base 54: mod_base = OTHER; note = nucleotide with phosphorothioate linkage
  modified_base 58: mod_base = OTHER; note = 2'-O-methyl modified nucleotide
  modified_base 59: mod_base = OTHER; note = 2'-O-methyl modified nucleotide
  modified_base 61: mod_base = OTHER; note = 2'-O-methyl modified nucleotide
  modified_base 62: mod_base = OTHER; note = 2'-O-methyl modified nucleotide
  modified_base 63: mod_base = OTHER; note = 2'-O-methyl modified nucleotide
  modified_base 64: mod_base = OTHER; note = 2'-O-methyl modified nucleotide
  modified_base 65: mod_base = OTHER; note = 2'-O-methyl modified nucleotide
  modified_base 66: mod_base = OTHER; note = 2'-O-methyl modified nucleotide
  modified_base 67: mod_base = OTHER; note = 2'-O-methyl modified nucleotide
  modified_base 68: mod_base = OTHER; note = 2'-O-methyl modified nucleotide
  modified_base 69: mod_base = OTHER; note = 2'-O-methyl modified nucleotide
  modified_base 70: mod_base = OTHER; note = 2'-O-methyl modified nucleotide
  modified_base 75: mod_base = OTHER; note = 2'-O-methyl modified nucleotide
  modified_base 77: mod_base = OTHER; note = 2'-O-methyl modified nucleotide
  modified_base 80: mod_base = OTHER; note = 2'-O-methyl modified nucleotide
  modified_base 86: mod_base = OTHER; note = 2'-O-methyl modified nucleotide
  modified_base 87: mod_base = OTHER; note = 2'-O-methyl modified nucleotide
  modified_base 89: mod_base = OTHER; note = 2'-O-methyl modified nucleotide
  modified_base 90: mod_base = OTHER; note = 2'-O-methyl modified nucleotide
  modified_base 91: mod_base = OTHER; note = 2'-O-methyl modified nucleotide
  modified_base 92: mod_base = OTHER; note = 2'-O-methyl modified nucleotide
  modified_base 99: mod_base = OTHER; note = nucleotide with phosphorothioate linkage
  modified_base 100: mod_base = OTHER; note = 2'-O-methyl modified nucleotide with phosphorothioate linkage
  modified_base 101: mod_base = OTHER; note = 2'-O-methyl modified nucleotide

SEQ ID NO: 2537 - RNA, 101 nt, synthetic construct; identical to SEQ ID NO: 1537
  source 1..101: mol_type = other RNA
  modified_base 1: mod_base = OTHER; note = 2'-O-methyl modified nucleotide with phosphorothioate linkage
  modified_base 2: mod_base = OTHER; note = 2'-O-methyl modified nucleotide with phosphorothioate linkage
  modified_base 3: mod_base = OTHER; note = 2'-O-methyl modified nucleotide with phosphorothioate linkage
  modified_base 4: mod_base = OTHER; note = 2'-O-methyl modified nucleotide
  modified_base 5: mod_base = OTHER; note = 2'-O-methyl modified nucleotide
  modified_base 8: mod_base = OTHER; note = 2'-O-methyl modified nucleotide
  modified_base 9: mod_base = OTHER; note = 2'-O-methyl modified nucleotide
  modified_base 11: mod_base = OTHER; note = 2'-O-methyl modified nucleotide
  modified_base 13: mod_base = OTHER; note = 2'-O-methyl modified nucleotide
  modified_base 18: mod_base = OTHER; note = 2'-O-methyl modified nucleotide
  modified_base 22: mod_base = OTHER; note = 2'-O-methyl modified nucleotide
  modified_base 25: mod_base = OTHER; note = 2'-O-methyl modified nucleotide
  modified_base 29: mod_base = OTHER; note = 2'-O-methyl modified nucleotide
  modified_base 30: mod_base = OTHER; note = 2'-O-methyl modified nucleotide
  modified_base 31: mod_base = OTHER; note = 2'-O-methyl modified nucleotide
  modified_base 32: mod_base = OTHER; note = 2'-O-methyl modified nucleotide
  modified_base 37: mod_base = OTHER; note = 2'-O-methyl modified nucleotide
  modified_base 38: mod_base = OTHER; note = 2'-O-methyl modified nucleotide
  modified_base 39: mod_base = OTHER; note = 2'-O-methyl modified nucleotide
  modified_base 40: mod_base = OTHER; note = 2'-O-methyl modified nucleotide
  modified_base 41: mod_base = OTHER; note = 2'-O-methyl modified nucleotide
  modified_base 42: mod_base = OTHER; note = 2'-O-methyl modified nucleotide
  modified_base 43: mod_base = OTHER; note = 2'-O-methyl modified nucleotide
  modified_base 47: mod_base = OTHER; note = 2'-O-methyl modified nucleotide
  modified_base 48: mod_base = OTHER; note = 2'-O-methyl modified nucleotide
  modified_base 51: mod_base = OTHER; note = 2'-O-methyl modified nucleotide
  modified_base 54: mod_base = OTHER; note = nucleotide with phosphorothioate linkage
  modified_base 58: mod_base = OTHER; note = 2'-O-methyl modified nucleotide
  modified_base 59: mod_base = OTHER; note = 2'-O-methyl modified nucleotide
  modified_base 61: mod_base = OTHER; note = 2'-O-methyl modified nucleotide
  modified_base 62: mod_base = OTHER; note = 2'-O-methyl modified nucleotide
  modified_base 63: mod_base = OTHER; note = 2'-O-methyl modified nucleotide
  modified_base 64: mod_base = OTHER; note = 2'-O-methyl modified nucleotide
  modified_base 65: mod_base = OTHER; note = 2'-O-methyl modified nucleotide
  modified_base 66: mod_base = OTHER; note = 2'-O-methyl modified nucleotide
  modified_base 67: mod_base = OTHER; note = 2'-O-methyl modified nucleotide
  modified_base 68: mod_base = OTHER; note = 2'-O-methyl modified nucleotide
  modified_base 69: mod_base = OTHER; note = 2'-O-methyl modified nucleotide
  modified_base 70: mod_base = OTHER; note = 2'-O-methyl modified nucleotide
  modified_base 75: mod_base = OTHER; note = 2'-O-methyl modified nucleotide
  modified_base 77: mod_base = OTHER; note = 2'-O-methyl modified nucleotide
  modified_base 80: mod_base = OTHER; note = 2'-O-methyl modified nucleotide
  modified_base 86: mod_base = OTHER; note = 2'-O-methyl modified nucleotide
  modified_base 87: mod_base = OTHER; note = 2'-O-methyl modified nucleotide
  modified_base 89: mod_base = OTHER; note = 2'-O-methyl modified nucleotide
  modified_base 90: mod_base = OTHER; note = 2'-O-methyl modified nucleotide
  modified_base 91: mod_base = OTHER; note = 2'-O-methyl modified nucleotide
  modified_base 92: mod_base = OTHER; note = 2'-O-methyl modified nucleotide
  modified_base 99: mod_base = OTHER; note = nucleotide with phosphorothioate linkage
  modified_base 100: mod_base = OTHER; note = 2'-O-methyl modified nucleotide with phosphorothioate linkage
  modified_base 101: mod_base = OTHER; note = 2'-O-methyl modified nucleotide

SEQ ID NO: 2538 - RNA, 101 nt, synthetic construct; identical to SEQ ID NO: 1538
  source 1..101: mol_type = other RNA
  modified_base 1: mod_base = OTHER; note = 2'-O-methyl modified nucleotide with phosphorothioate linkage
  modified_base 2: mod_base = OTHER; note = 2'-O-methyl modified nucleotide with phosphorothioate linkage
  modified_base 3: mod_base = OTHER; note = 2'-O-methyl modified nucleotide with phosphorothioate linkage
  modified_base 4: mod_base = OTHER; note = 2'-O-methyl modified nucleotide
  modified_base 5: mod_base = OTHER; note = 2'-O-methyl modified nucleotide
  modified_base 8: mod_base = OTHER; note = 2'-O-methyl modified nucleotide
  modified_base 9: mod_base = OTHER; note = 2'-O-methyl modified nucleotide
  modified_base 11: mod_base = OTHER; note = 2'-O-methyl modified nucleotide
  modified_base 13: mod_base = OTHER; note = 2'-O-methyl modified nucleotide
  modified_base 18: mod_base = OTHER; note = 2'-O-methyl modified nucleotide
  modified_base 22: mod_base = OTHER; note = 2'-O-methyl modified nucleotide
  modified_base 25: mod_base = OTHER; note = 2'-O-methyl modified nucleotide
  modified_base 29: mod_base = OTHER; note = 2'-O-methyl modified nucleotide
  modified_base 30: mod_base = OTHER; note = 2'-O-methyl modified nucleotide
  modified_base 31: mod_base = OTHER; note = 2'-O-methyl modified nucleotide
  modified_base 32: mod_base = OTHER; note = 2'-O-methyl modified nucleotide
  modified_base 37: mod_base = OTHER; note = 2'-O-methyl modified nucleotide
  modified_base 38: mod_base = OTHER; note = 2'-O-methyl modified nucleotide
  modified_base 39: mod_base = OTHER; note = 2'-O-methyl modified nucleotide
  modified_base 40: mod_base = OTHER; note = 2'-O-methyl modified nucleotide
  modified_base 41: mod_base = OTHER; note = 2'-O-methyl modified nucleotide
  modified_base 42: mod_base = OTHER; note = 2'-O-methyl modified nucleotide
  modified_base 43: mod_base = OTHER; note = 2'-O-methyl modified nucleotide
  modified_base 47: mod_base = OTHER; note = 2'-O-methyl modified nucleotide
  modified_base 48: mod_base = OTHER; note = 2'-O-methyl modified nucleotide
  modified_base 51: mod_base = OTHER; note = 2'-O-methyl modified nucleotide
  modified_base 54: mod_base = OTHER; note = nucleotide with phosphorothioate linkage
  modified_base 58: mod_base = OTHER; note = 2'-O-methyl modified nucleotide
  modified_base 59: mod_base = OTHER; note = 2'-O-methyl modified nucleotide
  modified_base 61: mod_base = OTHER; note = 2'-O-methyl modified nucleotide
  modified_base 62: mod_base = OTHER; note = 2'-O-methyl modified nucleotide
  modified_base 63: mod_base = OTHER; note = 2'-O-methyl modified nucleotide
  modified_base 64: mod_base = OTHER; note = 2'-O-methyl modified nucleotide
  modified_base 65: mod_base = OTHER; note = 2'-O-methyl modified nucleotide
  modified_base 66: mod_base = OTHER; note = 2'-O-methyl modified nucleotide
  modified_base 67: mod_base = OTHER; note = 2'-O-methyl modified nucleotide
  modified_base 68: mod_base = OTHER; note = 2'-O-methyl modified nucleotide
  modified_base 69: mod_base = OTHER; note = 2'-O-methyl modified nucleotide
  modified_base 70: mod_base = OTHER; note = 2'-O-methyl modified nucleotide
  modified_base 75: mod_base = OTHER; note = 2'-O-methyl modified nucleotide
  modified_base 77: mod_base = OTHER; note = 2'-O-methyl modified nucleotide
  modified_base 80: mod_base = OTHER; note = 2'-O-methyl modified nucleotide
  modified_base 86: mod_base = OTHER; note = 2'-O-methyl modified nucleotide
  modified_base 87: mod_base = OTHER; note = 2'-O-methyl modified nucleotide
  modified_base 89: mod_base = OTHER; note = 2'-O-methyl modified nucleotide
  modified_base 90: mod_base = OTHER; note = 2'-O-methyl modified nucleotide
  modified_base 91: mod_base = OTHER; note = 2'-O-methyl modified nucleotide
  modified_base 92: mod_base = OTHER; note = 2'-O-methyl modified nucleotide
  modified_base 99: mod_base = OTHER; note = nucleotide with phosphorothioate linkage
  modified_base 100: mod_base = OTHER; note = 2'-O-methyl modified nucleotide with phosphorothioate linkage
  modified_base 101: mod_base = OTHER; note = 2'-O-methyl modified nucleotide

SEQ ID NO: 2539 - RNA, 101 nt, synthetic construct; identical to SEQ ID NO: 1539
  source 1..101: mol_type = other RNA
  modified_base 1: mod_base = OTHER; note = 2'-O-methyl modified nucleotide with phosphorothioate linkage
  modified_base 2: mod_base = OTHER; note = 2'-O-methyl modified nucleotide with phosphorothioate linkage
  modified_base 3: mod_base = OTHER; note = 2'-O-methyl modified nucleotide with phosphorothioate linkage
  modified_base 4: mod_base = OTHER; note = 2'-O-methyl modified nucleotide
  modified_base 5: mod_base = OTHER; note = 2'-O-methyl modified nucleotide
  modified_base 8: mod_base = OTHER; note = 2'-O-methyl modified nucleotide
  modified_base 9: mod_base = OTHER; note = 2'-O-methyl modified nucleotide
  modified_base 11: mod_base = OTHER; note = 2'-O-methyl modified nucleotide
  modified_base 13: mod_base = OTHER; note = 2'-O-methyl modified nucleotide
  modified_base 18: mod_base = OTHER; note = 2'-O-methyl modified nucleotide
  modified_base 22: mod_base = OTHER; note = 2'-O-methyl modified nucleotide
  modified_base 25: mod_base = OTHER; note = 2'-O-methyl modified nucleotide
  modified_base 29: mod_base = OTHER; note = 2'-O-methyl modified nucleotide
  modified_base 30: mod_base = OTHER; note = 2'-O-methyl modified nucleotide
  modified_base 31: mod_base = OTHER; note = 2'-O-methyl modified nucleotide
  modified_base 32: mod_base = OTHER; note = 2'-O-methyl modified nucleotide
  modified_base 37: mod_base = OTHER; note = 2'-O-methyl modified nucleotide
  modified_base 38: mod_base = OTHER; note = 2'-O-methyl modified nucleotide
  modified_base 39: mod_base = OTHER; note = 2'-O-methyl modified nucleotide
  modified_base 40: mod_base = OTHER; note = 2'-O-methyl modified nucleotide
  modified_base 41: mod_base = OTHER; note = 2'-O-methyl modified nucleotide
  modified_base 42: mod_base = OTHER; note = 2'-O-methyl modified nucleotide
  modified_base 43: mod_base = OTHER; note = 2'-O-methyl modified nucleotide
  modified_base 47: mod_base = OTHER; note = 2'-O-methyl modified nucleotide
  modified_base 48: mod_base = OTHER; note = 2'-O-methyl modified nucleotide
  modified_base 51: mod_base = OTHER; note = 2'-O-methyl modified nucleotide
  modified_base 54: mod_base = OTHER; note = nucleotide with phosphorothioate linkage
  modified_base 58: mod_base = OTHER; note = 2'-O-methyl modified nucleotide
  modified_base 59: mod_base = OTHER; note = 2'-O-methyl modified nucleotide
  modified_base 61: mod_base = OTHER; note = 2'-O-methyl modified nucleotide
  modified_base 62: mod_base = OTHER; note = 2'-O-methyl modified nucleotide
  modified_base 63: mod_base = OTHER; note = 2'-O-methyl modified nucleotide
  modified_base 64: mod_base = OTHER; note = 2'-O-methyl modified nucleotide
  modified_base 65: mod_base = OTHER; note = 2'-O-methyl modified nucleotide
  modified_base 66: mod_base = OTHER; note = 2'-O-methyl modified nucleotide
  modified_base 67: mod_base = OTHER; note = 2'-O-methyl modified nucleotide
  modified_base 68: mod_base = OTHER; note = 2'-O-methyl modified nucleotide
  modified_base 69: mod_base = OTHER; note = 2'-O-methyl modified nucleotide
  modified_base 70: mod_base = OTHER; note = 2'-O-methyl modified nucleotide
  modified_base 75: mod_base = OTHER; note = 2'-O-methyl modified nucleotide
  modified_base 77: mod_base = OTHER; note = 2'-O-methyl modified nucleotide
  modified_base 80: mod_base = OTHER; note = 2'-O-methyl modified nucleotide
  modified_base 86: mod_base = OTHER; note = 2'-O-methyl modified nucleotide
  modified_base 87: mod_base = OTHER; note = 2'-O-methyl modified nucleotide
  modified_base 89: mod_base = OTHER; note = 2'-O-methyl modified nucleotide
  modified_base 90: mod_base = OTHER; note = 2'-O-methyl modified nucleotide
  modified_base 91: mod_base = OTHER; note = 2'-O-methyl modified nucleotide
  modified_base 92: mod_base = OTHER; note = 2'-O-methyl modified nucleotide
  modified_base 99: mod_base = OTHER; note = nucleotide with phosphorothioate linkage
  modified_base 100: mod_base = OTHER; note = 2'-O-methyl modified nucleotide with phosphorothioate linkage
  modified_base 101: mod_base = OTHER; note = 2'-O-methyl modified nucleotide

SEQ ID NO: 2540 - RNA, 101 nt, synthetic construct; identical to SEQ ID NO: 1540
  source 1..101: mol_type = other RNA
  modified_base 1: mod_base = OTHER; note = 2'-O-methyl modified nucleotide with phosphorothioate linkage
  modified_base 2: mod_base = OTHER; note = 2'-O-methyl modified nucleotide with phosphorothioate linkage
  modified_base 3: mod_base = OTHER; note = 2'-O-methyl modified nucleotide with phosphorothioate linkage
  modified_base 4: mod_base = OTHER; note = 2'-O-methyl modified nucleotide
  modified_base 5: mod_base = OTHER; note = 2'-O-methyl modified nucleotide
  modified_base 8: mod_base = OTHER; note = 2'-O-methyl modified nucleotide
  modified_base 9: mod_base = OTHER; note = 2'-O-methyl modified nucleotide
  modified_base 11: mod_base = OTHER; note = 2'-O-methyl modified nucleotide
  modified_base 13: mod_base = OTHER; note = 2'-O-methyl modified nucleotide
  modified_base 18: mod_base = OTHER; note = 2'-O-methyl modified nucleotide
  modified_base 22: mod_base = OTHER; note = 2'-O-methyl modified nucleotide
  modified_base 25: mod_base = OTHER; note = 2'-O-methyl modified nucleotide
  modified_base 29: mod_base = OTHER; note = 2'-O-methyl modified nucleotide
  modified_base 30: mod_base = OTHER; note = 2'-O-methyl modified nucleotide
  modified_base 31: mod_base = OTHER; note = 2'-O-methyl modified nucleotide
  modified_base 32: mod_base = OTHER; note = 2'-O-methyl modified nucleotide
  modified_base 37: mod_base = OTHER; note = 2'-O-methyl modified nucleotide
  modified_base 38: mod_base = OTHER; note = 2'-O-methyl modified nucleotide
  modified_base 39: mod_base = OTHER; note = 2'-O-methyl modified nucleotide
  modified_base 40: mod_base = OTHER; note = 2'-O-methyl modified nucleotide
  modified_base 41: mod_base = OTHER; note = 2'-O-methyl modified nucleotide
  modified_base 42: mod_base = OTHER; note = 2'-O-methyl modified nucleotide
  modified_base 43: mod_base = OTHER; note = 2'-O-methyl modified nucleotide
  modified_base 47: mod_base = OTHER; note = 2'-O-methyl modified nucleotide
  modified_base 48: mod_base = OTHER; note = 2'-O-methyl modified nucleotide
  modified_base 51: mod_base = OTHER; note = 2'-O-methyl modified nucleotide
  modified_base 54: mod_base = OTHER; note = nucleotide with phosphorothioate linkage
  modified_base 58: mod_base = OTHER; note = 2'-O-methyl modified nucleotide
  modified_base 59: mod_base = OTHER; note = 2'-O-methyl modified nucleotide
  modified_base 61: mod_base = OTHER; note = 2'-O-methyl modified nucleotide
  modified_base 62: mod_base = OTHER; note = 2'-O-methyl modified nucleotide
  modified_base 63: mod_base = OTHER; note = 2'-O-methyl modified nucleotide
  modified_base 64: mod_base = OTHER; note = 2'-O-methyl modified nucleotide
  modified_base 65: mod_base = OTHER; note = 2'-O-methyl modified nucleotide
  modified_base 66: mod_base = OTHER; note = 2'-O-methyl modified nucleotide
  modified_base 67: mod_base = OTHER; note = 2'-O-methyl modified nucleotide
  modified_base 68: mod_base = OTHER; note = 2'-O-methyl modified nucleotide
  modified_base 69: mod_base = OTHER; note = 2'-O-methyl modified nucleotide
  modified_base 70: mod_base = OTHER; note = 2'-O-methyl modified nucleotide
  modified_base 75: mod_base = OTHER; note = 2'-O-methyl modified nucleotide
  modified_base 77: mod_base = OTHER; note = 2'-O-methyl modified nucleotide
  modified_base 80: mod_base = OTHER; note = 2'-O-methyl modified nucleotide
  modified_base 86: mod_base = OTHER; note = 2'-O-methyl modified nucleotide
  modified_base 87: mod_base = OTHER; note = 2'-O-methyl modified nucleotide
  modified_base 89: mod_base = OTHER; note = 2'-O-methyl modified nucleotide
  modified_base 90: mod_base = OTHER; note = 2'-O-methyl modified nucleotide
  modified_base 91: mod_base = OTHER; note = 2'-O-methyl modified nucleotide
  modified_base 92: mod_base = OTHER; note = 2'-O-methyl modified nucleotide
  modified_base 99: mod_base = OTHER; note = nucleotide with phosphorothioate linkage
  modified_base 100: mod_base = OTHER; note = 2'-O-methyl modified nucleotide with phosphorothioate linkage
  modified_base 101: mod_base = OTHER; note = 2'-O-methyl modified nucleotide

SEQ ID NO: 2541 - RNA, 101 nt, synthetic construct; identical to SEQ ID NO: 1541
  source 1..101: mol_type = other RNA
  modified_base 1: mod_base = OTHER; note = 2'-O-methyl modified nucleotide with phosphorothioate linkage
  modified_base 2: mod_base = OTHER; note = 2'-O-methyl modified nucleotide with phosphorothioate linkage
  modified_base 3: mod_base = OTHER; note = 2'-O-methyl modified nucleotide with phosphorothioate linkage
  modified_base 4: mod_base = OTHER; note = 2'-O-methyl modified nucleotide
  modified_base 5: mod_base = OTHER; note = 2'-O-methyl modified nucleotide
  modified_base 8: mod_base = OTHER; note = 2'-O-methyl modified nucleotide
  modified_base 9: mod_base = OTHER; note = 2'-O-methyl modified nucleotide
  modified_base 11: mod_base = OTHER; note = 2'-O-methyl modified nucleotide
  modified_base 13: mod_base = OTHER; note = 2'-O-methyl modified nucleotide
  modified_base 18: mod_base = OTHER; note = 2'-O-methyl modified nucleotide
  modified_base 22: mod_base = OTHER; note = 2'-O-methyl modified nucleotide
  modified_base 25: mod_base = OTHER; note = 2'-O-methyl modified nucleotide
  modified_base 29: mod_base = OTHER; note = 2'-O-methyl modified nucleotide
  modified_base 30: mod_base = OTHER; note = 2'-O-methyl modified nucleotide
  modified_base 31: mod_base = OTHER; note = 2'-O-methyl modified nucleotide
  modified_base 32: mod_base = OTHER; note = 2'-O-methyl modified nucleotide
  modified_base 37: mod_base = OTHER; note = 2'-O-methyl modified nucleotide
  modified_base 38: mod_base = OTHER; note = 2'-O-methyl modified nucleotide
  modified_base 39: mod_base = OTHER; note = 2'-O-methyl modified nucleotide
  modified_base 40: mod_base = OTHER; note = 2'-O-methyl modified nucleotide
  modified_base 41: mod_base = OTHER; note = 2'-O-methyl modified nucleotide
  modified_base 42: mod_base = OTHER; note = 2'-O-methyl modified nucleotide
  modified_base 43: mod_base = OTHER; note = 2'-O-methyl modified nucleotide
  modified_base 47: mod_base = OTHER; note = 2'-O-methyl modified nucleotide
  modified_base 48: mod_base = OTHER; note = 2'-O-methyl modified nucleotide
  modified_base 51: mod_base = OTHER; note = 2'-O-methyl modified nucleotide
  modified_base 54: mod_base = OTHER; note = nucleotide with phosphorothioate linkage
  modified_base 58: mod_base = OTHER; note = 2'-O-methyl modified nucleotide
  modified_base 59: mod_base = OTHER; note = 2'-O-methyl modified nucleotide
  modified_base 61: mod_base = OTHER; note = 2'-O-methyl modified nucleotide
  modified_base 62: mod_base = OTHER; note = 2'-O-methyl modified nucleotide
  modified_base 63: mod_base = OTHER; note = 2'-O-methyl modified nucleotide
  modified_base 64: mod_base = OTHER; note = 2'-O-methyl modified nucleotide
  modified_base 65: mod_base = OTHER; note = 2'-O-methyl modified nucleotide
  modified_base 66: mod_base = OTHER; note = 2'-O-methyl modified nucleotide
  modified_base 67: mod_base = OTHER; note = 2'-O-methyl modified nucleotide
  modified_base 68: mod_base = OTHER; note = 2'-O-methyl modified nucleotide
  modified_base 69: mod_base = OTHER; note = 2'-O-methyl modified nucleotide
  modified_base 70: mod_base = OTHER; note = 2'-O-methyl modified nucleotide
  modified_base 75: mod_base = OTHER; note = 2'-O-methyl modified nucleotide
  modified_base 77: mod_base = OTHER; note = 2'-O-methyl modified nucleotide
  modified_base 80: mod_base = OTHER; note = 2'-O-methyl modified nucleotide
  modified_base 86: mod_base = OTHER; note = 2'-O-methyl modified nucleotide
  modified_base 87: mod_base = OTHER; note = 2'-O-methyl modified nucleotide
  modified_base 89: mod_base = OTHER; note = 2'-O-methyl modified nucleotide
  modified_base 90: mod_base = OTHER; note = 2'-O-methyl modified nucleotide
  modified_base 91: mod_base = OTHER; note = 2'-O-methyl modified nucleotide
  modified_base 92: mod_base = OTHER; note = 2'-O-methyl modified nucleotide
  modified_base 99: mod_base = OTHER; note = nucleotide with phosphorothioate linkage
  modified_base 100: mod_base = OTHER; note = 2'-O-methyl modified nucleotide with phosphorothioate linkage
  modified_base 101: mod_base = OTHER; note = 2'-O-methyl modified nucleotide

SEQ ID NO: 2542 - RNA, 101 nt, synthetic construct; identical to SEQ ID NO: 1542
  source 1..101: mol_type = other RNA
  modified_base 1: mod_base = OTHER; note = 2'-O-methyl modified nucleotide with phosphorothioate linkage
  modified_base 2: mod_base = OTHER; note = 2'-O-methyl modified nucleotide with phosphorothioate linkage
  modified_base 3: mod_base = OTHER; note = 2'-O-methyl modified nucleotide with phosphorothioate linkage
  modified_base 4: mod_base = OTHER; note = 2'-O-methyl modified nucleotide
  modified_base 5: mod_base = OTHER; note = 2'-O-methyl modified nucleotide
  modified_base 8: mod_base = OTHER; note = 2'-O-methyl modified nucleotide
  modified_base 9: mod_base = OTHER; note = 2'-O-methyl modified nucleotide
  modified_base 11: mod_base = OTHER; note = 2'-O-methyl modified nucleotide
  modified_base 13: mod_base = OTHER; note = 2'-O-methyl modified nucleotide
  modified_base 18: mod_base = OTHER; note = 2'-O-methyl modified nucleotide
  modified_base 22: mod_base = OTHER; note = 2'-O-methyl modified nucleotide
  modified_base 25: mod_base = OTHER; note = 2'-O-methyl modified nucleotide
  modified_base 29: mod_base = OTHER; note = 2'-O-methyl modified nucleotide
  modified_base 30: mod_base = OTHER; note = 2'-O-methyl modified nucleotide
  modified_base 31: mod_base = OTHER; note = 2'-O-methyl modified nucleotide
  modified_base 32: mod_base = OTHER; note = 2'-O-methyl modified nucleotide
  modified_base 37: mod_base = OTHER; note = 2'-O-methyl modified nucleotide
  modified_base 38: mod_base = OTHER; note = 2'-O-methyl modified nucleotide
  modified_base 39: mod_base = OTHER; note = 2'-O-methyl modified nucleotide
  modified_base 40: mod_base = OTHER; note = 2'-O-methyl modified nucleotide
  modified_base 41: mod_base = OTHER; note = 2'-O-methyl modified nucleotide
  modified_base 42: mod_base = OTHER; note = 2'-O-methyl modified nucleotide
  modified_base 43: mod_base = OTHER; note = 2'-O-methyl modified nucleotide
  modified_base 47: mod_base = OTHER; note = 2'-O-methyl modified nucleotide
  modified_base 48: mod_base = OTHER; note = 2'-O-methyl modified nucleotide
  modified_base 51: mod_base = OTHER; note = 2'-O-methyl modified nucleotide
  modified_base 54: mod_base = OTHER; note = nucleotide with phosphorothioate linkage
  modified_base 58: mod_base = OTHER; note = 2'-O-methyl modified nucleotide
  modified_base 59: mod_base = OTHER; note = 2'-O-methyl modified nucleotide
  modified_base 61: mod_base = OTHER; note = 2'-O-methyl modified nucleotide
  modified_base 62: mod_base = OTHER; note = 2'-O-methyl modified nucleotide
  modified_base 63: mod_base = OTHER; note = 2'-O-methyl modified nucleotide
  modified_base 64: mod_base = OTHER; note = 2'-O-methyl modified nucleotide
  modified_base 65: mod_base = OTHER; note = 2'-O-methyl modified nucleotide
  modified_base 66: mod_base = OTHER; note = 2'-O-methyl modified nucleotide
  modified_base 67: mod_base = OTHER; note = 2'-O-methyl modified nucleotide
  modified_base 68: mod_base = OTHER; note = 2'-O-methyl modified nucleotide
  modified_base 69: mod_base = OTHER; note = 2'-O-methyl modified nucleotide
  modified_base 70: mod_base = OTHER; note = 2'-O-methyl modified nucleotide
  modified_base 75: mod_base = OTHER; note = 2'-O-methyl modified nucleotide
  modified_base 77: mod_base = OTHER; note = 2'-O-methyl modified nucleotide
  modified_base 80: mod_base = OTHER; note = 2'-O-methyl modified nucleotide
  modified_base 86: mod_base = OTHER; note = 2'-O-methyl modified nucleotide
  modified_base 87: mod_base = OTHER; note = 2'-O-methyl modified nucleotide
  modified_base 89: mod_base = OTHER; note = 2'-O-methyl modified nucleotide
  modified_base 90: mod_base = OTHER; note = 2'-O-methyl modified nucleotide
  modified_base 91: mod_base = OTHER; note = 2'-O-methyl modified nucleotide
  modified_base 92: mod_base = OTHER; note = 2'-O-methyl modified nucleotide
  modified_base 99: mod_base = OTHER; note = nucleotide with phosphorothioate linkage
  modified_base 100: mod_base = OTHER; note = 2'-O-methyl modified nucleotide with phosphorothioate linkage
  modified_base 101: mod_base = OTHER; note = 2'-O-methyl modified nucleotide

SEQ ID NO: 2543 - RNA, 101 nt, synthetic construct; identical to SEQ ID NO: 1543
  source 1..101: mol_type = other RNA
  modified_base 1: mod_base = OTHER; note = 2'-O-methyl modified nucleotide with phosphorothioate linkage
  modified_base 2: mod_base = OTHER; note = 2'-O-methyl modified nucleotide with phosphorothioate linkage
  modified_base 3: mod_base = OTHER; note = 2'-O-methyl modified nucleotide with phosphorothioate linkage
  modified_base 4: mod_base = OTHER; note = 2'-O-methyl modified nucleotide
  modified_base 5: mod_base = OTHER; note = 2'-O-methyl modified nucleotide
  modified_base 8: mod_base = OTHER; note = 2'-O-methyl modified nucleotide
  modified_base 9: mod_base = OTHER; note = 2'-O-methyl modified nucleotide
  modified_base 11: mod_base = OTHER; note = 2'-O-methyl modified nucleotide
  modified_base 13: mod_base = OTHER; note = 2'-O-methyl modified nucleotide
  modified_base 18: mod_base = OTHER; note = 2'-O-methyl modified nucleotide
  modified_base 22: mod_base = OTHER; note = 2'-O-methyl modified nucleotide
  modified_base 25: mod_base = OTHER; note = 2'-O-methyl modified nucleotide
  modified_base 29: mod_base = OTHER; note = 2'-O-methyl modified nucleotide
  modified_base 30: mod_base = OTHER; note = 2'-O-methyl modified nucleotide
  modified_base 31: mod_base = OTHER; note = 2'-O-methyl modified nucleotide
  modified_base 32: mod_base = OTHER; note = 2'-O-methyl modified nucleotide
  modified_base 37: mod_base = OTHER; note = 2'-O-methyl modified nucleotide
  modified_base 38: mod_base = OTHER; note = 2'-O-methyl modified nucleotide
  modified_base 39: mod_base = OTHER; note = 2'-O-methyl modified nucleotide
  modified_base 40: mod_base = OTHER; note = 2'-O-methyl modified nucleotide
  modified_base 41: mod_base = OTHER; note = 2'-O-methyl modified nucleotide
  modified_base 42: mod_base = OTHER; note = 2'-O-methyl modified nucleotide
  modified_base 43: mod_base = OTHER; note = 2'-O-methyl modified nucleotide
  modified_base 47: mod_base = OTHER; note = 2'-O-methyl modified nucleotide
  modified_base 48: mod_base = OTHER; note = 2'-O-methyl modified nucleotide
  modified_base 51: mod_base = OTHER; note = 2'-O-methyl modified nucleotide
  modified_base 54: mod_base = OTHER; note = nucleotide with phosphorothioate linkage
  modified_base 58: mod_base = OTHER; note = 2'-O-methyl modified nucleotide
  modified_base 59: mod_base = OTHER; note = 2'-O-methyl modified nucleotide
  modified_base 61: mod_base = OTHER; note = 2'-O-methyl modified nucleotide
  modified_base 62: mod_base = OTHER; note = 2'-O-methyl modified nucleotide
  modified_base 63: mod_base = OTHER; note = 2'-O-methyl modified nucleotide
  modified_base 64: mod_base = OTHER; note = 2'-O-methyl modified nucleotide
  modified_base 65: mod_base = OTHER; note = 2'-O-methyl modified nucleotide
  modified_base 66: mod_base = OTHER; note = 2'-O-methyl modified nucleotide
  modified_base 67: mod_base = OTHER; note = 2'-O-methyl modified nucleotide
  modified_base 68: mod_base = OTHER; note = 2'-O-methyl modified nucleotide
  modified_base 69: mod_base = OTHER; note = 2'-O-methyl modified nucleotide
  modified_base 70: mod_base = OTHER; note = 2'-O-methyl modified nucleotide
  modified_base 75: mod_base = OTHER; note = 2'-O-methyl modified nucleotide
  modified_base 77: mod_base = OTHER; note = 2'-O-methyl modified nucleotide
  modified_base 80: mod_base = OTHER; note = 2'-O-methyl modified nucleotide
  modified_base 86: mod_base = OTHER; note = 2'-O-methyl modified nucleotide
  modified_base 87: mod_base = OTHER; note = 2'-O-methyl modified nucleotide
  modified_base 89: mod_base = OTHER; note = 2'-O-methyl modified nucleotide
  modified_base 90: mod_base = OTHER; note = 2'-O-methyl modified nucleotide
  modified_base 91: mod_base = OTHER; note = 2'-O-methyl modified nucleotide
  modified_base 92: mod_base = OTHER; note = 2'-O-methyl modified nucleotide
  modified_base 99: mod_base = OTHER; note = nucleotide with phosphorothioate linkage
  modified_base 100: mod_base = OTHER; note = 2'-O-methyl modified nucleotide with phosphorothioate linkage
  modified_base 101: mod_base = OTHER; note = 2'-O-methyl modified nucleotide

SEQ ID NO: 2544 - RNA, 101 nt, synthetic construct; identical to SEQ ID NO: 1544
  source 1..101: mol_type = other RNA
  modified_base 1: mod_base = OTHER; note = 2'-O-methyl modified nucleotide with phosphorothioate linkage
  modified_base 2: mod_base = OTHER; note = 2'-O-methyl modified nucleotide with phosphorothioate linkage
  modified_base 3: mod_base = OTHER; note = 2'-O-methyl modified nucleotide with phosphorothioate linkage
  modified_base 4: mod_base = OTHER; note = 2'-O-methyl modified nucleotide
  modified_base 5: mod_base = OTHER; note = 2'-O-methyl modified nucleotide
  modified_base 8: mod_base = OTHER; note = 2'-O-methyl modified nucleotide
  modified_base 9: mod_base = OTHER; note = 2'-O-methyl modified nucleotide
  modified_base 11: mod_base = OTHER; note = 2'-O-methyl modified nucleotide
  modified_base 13: mod_base = OTHER; note = 2'-O-methyl modified nucleotide
  modified_base 18: mod_base = OTHER; note = 2'-O-methyl modified nucleotide
  modified_base 22: mod_base = OTHER; note = 2'-O-methyl modified nucleotide
  modified_base 25: mod_base = OTHER; note = 2'-O-methyl modified nucleotide
  modified_base 29: mod_base = OTHER; note = 2'-O-methyl modified nucleotide
  modified_base 30: mod_base = OTHER; note = 2'-O-methyl modified nucleotide
  modified_base 31: mod_base = OTHER; note = 2'-O-methyl modified nucleotide
  modified_base 32: mod_base = OTHER; note = 2'-O-methyl modified nucleotide
  modified_base 37: mod_base = OTHER; note = 2'-O-methyl modified nucleotide
  modified_base 38: mod_base = OTHER; note = 2'-O-methyl modified nucleotide
  modified_base 39: mod_base = OTHER; note = 2'-O-methyl modified nucleotide
  modified_base 40: mod_base = OTHER; note = 2'-O-methyl modified nucleotide
  modified_base 41: mod_base = OTHER; note = 2'-O-methyl modified nucleotide
  modified_base 42: mod_base = OTHER; note = 2'-O-methyl modified nucleotide
  modified_base 43: mod_base = OTHER; note = 2'-O-methyl modified nucleotide
  modified_base 47: mod_base = OTHER; note = 2'-O-methyl modified nucleotide
  modified_base 48: mod_base = OTHER; note = 2'-O-methyl modified nucleotide
  modified_base 51: mod_base = OTHER; note = 2'-O-methyl modified nucleotide
  modified_base 54: mod_base = OTHER; note = nucleotide with phosphorothioate linkage
  modified_base 58: mod_base = OTHER; note = 2'-O-methyl modified nucleotide
  modified_base 59: mod_base = OTHER; note = 2'-O-methyl modified nucleotide
  modified_base 61: mod_base = OTHER; note = 2'-O-methyl modified nucleotide
  modified_base 62: mod_base = OTHER; note = 2'-O-methyl modified nucleotide
  modified_base 63: mod_base = OTHER; note = 2'-O-methyl modified nucleotide
  modified_base 64: mod_base = OTHER; note = 2'-O-methyl modified nucleotide
  modified_base 65: mod_base = OTHER; note = 2'-O-methyl modified nucleotide
  modified_base 66: mod_base = OTHER; note = 2'-O-methyl modified nucleotide
  modified_base 67: mod_base = OTHER; note = 2'-O-methyl modified nucleotide
  modified_base 68: mod_base = OTHER; note = 2'-O-methyl modified nucleotide
  modified_base 69: mod_base = OTHER; note = 2'-O-methyl modified nucleotide
  modified_base 70: mod_base = OTHER; note = 2'-O-methyl modified nucleotide
  modified_base 75: mod_base = OTHER; note = 2'-O-methyl modified nucleotide
  modified_base 77: mod_base = OTHER; note = 2'-O-methyl modified nucleotide
  modified_base 80: mod_base = OTHER; note = 2'-O-methyl modified nucleotide
  modified_base 86: mod_base = OTHER; note = 2'-O-methyl modified nucleotide
  modified_base 87: mod_base = OTHER; note = 2'-O-methyl modified nucleotide
  modified_base 89: mod_base = OTHER; note = 2'-O-methyl modified nucleotide
  modified_base 90: mod_base = OTHER; note = 2'-O-methyl modified nucleotide
  modified_base 91: mod_base = OTHER; note = 2'-O-methyl modified nucleotide
  modified_base 92: mod_base = OTHER; note = 2'-O-methyl modified nucleotide
  modified_base 99: mod_base = OTHER; note = nucleotide with phosphorothioate linkage
  modified_base 100: mod_base = OTHER; note = 2'-O-methyl modified nucleotide with phosphorothioate linkage
  modified_base 101: mod_base = OTHER; note = 2'-O-methyl modified nucleotide

SEQ ID NO: 2545 - RNA, 101 nt, synthetic construct; identical to SEQ ID NO: 1545
  source 1..101: mol_type = other RNA
  modified_base 1: mod_base = OTHER; note = 2'-O-methyl modified nucleotide with phosphorothioate linkage
  modified_base 2: mod_base = OTHER; note = 2'-O-methyl modified nucleotide with phosphorothioate linkage
  modified_base 3: mod_base = OTHER; note = 2'-O-methyl modified nucleotide with phosphorothioate linkage
  modified_base 4: mod_base = OTHER; note = 2'-O-methyl modified nucleotide
  modified_base 5: mod_base = OTHER; note = 2'-O-methyl modified nucleotide
  modified_base 8: mod_base = OTHER; note = 2'-O-methyl modified nucleotide
  modified_base 9: mod_base = OTHER; note = 2'-O-methyl modified nucleotide
  modified_base 11: mod_base = OTHER; note = 2'-O-methyl modified nucleotide
  modified_base 13: mod_base = OTHER; note = 2'-O-methyl modified nucleotide
  modified_base 18: mod_base = OTHER; note = 2'-O-methyl modified nucleotide
  modified_base 22: mod_base = OTHER; note = 2'-O-methyl modified nucleotide
  modified_base 25: mod_base = OTHER; note = 2'-O-methyl modified nucleotide
  modified_base 29: mod_base = OTHER; note = 2'-O-methyl modified nucleotide
  modified_base 30: mod_base = OTHER; note = 2'-O-methyl modified nucleotide
  modified_base 31: mod_base = OTHER; note = 2'-O-methyl modified nucleotide
  modified_base 32: mod_base = OTHER; note = 2'-O-methyl modified nucleotide
  modified_base 37: mod_base = OTHER; note = 2'-O-methyl modified nucleotide
  modified_base 38: mod_base = OTHER; note = 2'-O-methyl modified nucleotide
  modified_base 39: mod_base = OTHER; note = 2'-O-methyl modified nucleotide
  modified_base 40: mod_base = OTHER; note = 2'-O-methyl modified nucleotide
  modified_base 41: mod_base = OTHER; note = 2'-O-methyl modified nucleotide
  modified_base 42: mod_base = OTHER; note = 2'-O-methyl modified nucleotide
  modified_base 43: mod_base = OTHER; note = 2'-O-methyl modified nucleotide
  modified_base 47: mod_base = OTHER; note = 2'-O-methyl modified nucleotide
  modified_base 48: mod_base = OTHER; note = 2'-O-methyl modified nucleotide
  modified_base 51: mod_base = OTHER; note = 2'-O-methyl modified nucleotide
  modified_base 54: mod_base = OTHER; note = nucleotide with phosphorothioate linkage
  modified_base 58: mod_base = OTHER; note = 2'-O-methyl modified nucleotide
  modified_base 59: mod_base = OTHER; note = 2'-O-methyl modified nucleotide
  modified_base 61: mod_base = OTHER; note = 2'-O-methyl modified nucleotide
  modified_base 62: mod_base = OTHER; note = 2'-O-methyl modified nucleotide
  modified_base 63: mod_base = OTHER; note = 2'-O-methyl modified nucleotide
  modified_base 64: mod_base = OTHER; note = 2'-O-methyl modified nucleotide
  modified_base 65: mod_base = OTHER; note = 2'-O-methyl modified nucleotide
  modified_base 66: mod_base = OTHER; note = 2'-O-methyl modified nucleotide
  modified_base 67: mod_base = OTHER; note = 2'-O-methyl modified nucleotide
  modified_base 68: mod_base = OTHER; note = 2'-O-methyl modified nucleotide
  modified_base 69: mod_base = OTHER; note = 2'-O-methyl modified nucleotide
  modified_base 70: mod_base = OTHER; note = 2'-O-methyl modified nucleotide
  modified_base 75: mod_base = OTHER; note = 2'-O-methyl modified nucleotide
  modified_base 77: mod_base = OTHER; note = 2'-O-methyl modified nucleotide
  modified_base 80: mod_base = OTHER; note = 2'-O-methyl modified nucleotide
  modified_base 86: mod_base = OTHER; note = 2'-O-methyl modified nucleotide
  modified_base 87: mod_base = OTHER; note = 2'-O-methyl modified nucleotide
  modified_base 89: mod_base = OTHER; note = 2'-O-methyl modified nucleotide
  modified_base 90: mod_base = OTHER; note = 2'-O-methyl modified nucleotide
  modified_base 91: mod_base = OTHER; note = 2'-O-methyl modified nucleotide
  modified_base 92: mod_base = OTHER; note = 2'-O-methyl modified nucleotide
  modified_base 99: mod_base = OTHER; note = nucleotide with phosphorothioate linkage
  modified_base 100: mod_base = OTHER; note = 2'-O-methyl modified nucleotide with phosphorothioate linkage
  modified_base 101: mod_base = OTHER; note = 2'-O-methyl modified nucleotide

SEQ ID NO: 2546 - RNA, 101 nt, synthetic construct; identical to SEQ ID NO: 1546
  source 1..101: mol_type = other RNA
  modified_base 1: mod_base = OTHER; note = 2'-O-methyl modified nucleotide with phosphorothioate linkage
  modified_base 2: mod_base = OTHER; note = 2'-O-methyl modified nucleotide with phosphorothioate linkage
  modified_base 3: mod_base = OTHER; note = 2'-O-methyl modified nucleotide with phosphorothioate linkage
  modified_base 4: mod_base = OTHER; note = 2'-O-methyl modified nucleotide
  modified_base 5: mod_base = OTHER; note = 2'-O-methyl modified nucleotide
  modified_base 8: mod_base = OTHER; note = 2'-O-methyl modified nucleotide
  modified_base 9: mod_base = OTHER; note = 2'-O-methyl modified nucleotide
  modified_base 11: mod_base = OTHER; note = 2'-O-methyl modified nucleotide
  modified_base 13: mod_base = OTHER; note = 2'-O-methyl modified nucleotide
  modified_base 18: mod_base = OTHER; note = 2'-O-methyl modified nucleotide
  modified_base 22: mod_base = OTHER; note = 2'-O-methyl modified nucleotide
  modified_base 25: mod_base = OTHER; note = 2'-O-methyl modified nucleotide
  modified_base 29: mod_base = OTHER; note = 2'-O-methyl modified nucleotide
  modified_base 30: mod_base = OTHER; note = 2'-O-methyl modified nucleotide
  modified_base 31: mod_base = OTHER; note = 2'-O-methyl modified nucleotide
  modified_base 32: mod_base = OTHER; note = 2'-O-methyl modified nucleotide
  modified_base 37: mod_base = OTHER; note = 2'-O-methyl modified nucleotide
  modified_base 38: mod_base = OTHER; note = 2'-O-methyl modified nucleotide
  modified_base 39: mod_base = OTHER; note = 2'-O-methyl modified nucleotide
  modified_base 40: mod_base = OTHER; note = 2'-O-methyl modified nucleotide
  modified_base 41: mod_base = OTHER; note = 2'-O-methyl modified nucleotide
  modified_base 42: mod_base = OTHER; note = 2'-O-methyl modified nucleotide
  modified_base 43: mod_base = OTHER; note = 2'-O-methyl modified nucleotide
  modified_base 47: mod_base = OTHER; note = 2'-O-methyl modified nucleotide
  modified_base 48: mod_base = OTHER; note = 2'-O-methyl modified nucleotide
  modified_base 51: mod_base = OTHER; note = 2'-O-methyl modified nucleotide
  modified_base 54: mod_base = OTHER; note = nucleotide with phosphorothioate linkage
  modified_base 58: mod_base = OTHER; note = 2'-O-methyl modified nucleotide
  modified_base 59: mod_base = OTHER; note = 2'-O-methyl modified nucleotide
  modified_base 61: mod_base = OTHER; note = 2'-O-methyl modified nucleotide
  modified_base 62: mod_base = OTHER; note = 2'-O-methyl modified nucleotide
  modified_base 63: mod_base = OTHER; note = 2'-O-methyl modified nucleotide
  modified_base 64: mod_base = OTHER; note = 2'-O-methyl modified nucleotide
  modified_base 65: mod_base = OTHER; note = 2'-O-methyl modified nucleotide
  modified_base 66: mod_base = OTHER; note = 2'-O-methyl modified nucleotide
  modified_base 67: mod_base = OTHER; note = 2'-O-methyl modified nucleotide
  modified_base 68: mod_base = OTHER; note = 2'-O-methyl modified nucleotide
  modified_base 69: mod_base = OTHER; note = 2'-O-methyl modified nucleotide
  modified_base 70: mod_base = OTHER; note = 2'-O-methyl modified nucleotide
  modified_base 75: mod_base = OTHER; note = 2'-O-methyl modified nucleotide
  modified_base 77: mod_base = OTHER; note = 2'-O-methyl modified nucleotide
  modified_base 80: mod_base = OTHER; note = 2'-O-methyl modified nucleotide
  modified_base 86: mod_base = OTHER; note = 2'-O-methyl modified nucleotide
  modified_base 87: mod_base = OTHER; note = 2'-O-methyl modified nucleotide
  modified_base 89: mod_base = OTHER; note = 2'-O-methyl modified nucleotide
  modified_base 90: mod_base = OTHER; note = 2'-O-methyl modified nucleotide
  modified_base 91: mod_base = OTHER; note = 2'-O-methyl modified nucleotide
  modified_base 92: mod_base = OTHER; note = 2'-O-methyl modified nucleotide
  modified_base 99: mod_base = OTHER; note = nucleotide with phosphorothioate linkage
  modified_base 100: mod_base = OTHER; note = 2'-O-methyl modified nucleotide with phosphorothioate linkage
  modified_base 101: mod_base = OTHER; note = 2'-O-methyl modified nucleotide

SEQ ID NO: 2547 - RNA, 101 nt, synthetic construct; identical to SEQ ID NO: 1547
  source 1..101: mol_type = other RNA
  modified_base 1: mod_base = OTHER; note = 2'-O-methyl modified nucleotide with phosphorothioate linkage
  modified_base 2: mod_base = OTHER; note = 2'-O-methyl modified nucleotide with phosphorothioate linkage
  modified_base 3: mod_base = OTHER; note = 2'-O-methyl modified nucleotide with phosphorothioate linkage
  modified_base 4: mod_base = OTHER; note = 2'-O-methyl modified nucleotide
  modified_base 5: mod_base = OTHER; note = 2'-O-methyl modified nucleotide
  modified_base 8: mod_base = OTHER; note = 2'-O-methyl modified nucleotide
  modified_base 9: mod_base = OTHER; note = 2'-O-methyl modified nucleotide
  modified_base 11: mod_base = OTHER; note = 2'-O-methyl modified nucleotide
  modified_base 13: mod_base = OTHER; note = 2'-O-methyl modified nucleotide
  modified_base 18: mod_base = OTHER; note = 2'-O-methyl modified nucleotide
  modified_base 22: mod_base = OTHER; note = 2'-O-methyl modified nucleotide
  modified_base 25: mod_base = OTHER; note = 2'-O-methyl modified nucleotide
  modified_base 29: mod_base = OTHER; note = 2'-O-methyl modified nucleotide
  modified_base 30: mod_base = OTHER; note = 2'-O-methyl modified nucleotide
  modified_base 31: mod_base = OTHER; note = 2'-O-methyl modified nucleotide
  modified_base 32: mod_base = OTHER; note = 2'-O-methyl modified nucleotide
  modified_base 37: mod_base = OTHER; note = 2'-O-methyl modified nucleotide
  modified_base 38: mod_base = OTHER; note = 2'-O-methyl modified nucleotide
  modified_base 39: mod_base = OTHER; note = 2'-O-methyl modified nucleotide
  modified_base 40: mod_base = OTHER; note = 2'-O-methyl modified nucleotide
  modified_base 41: mod_base = OTHER; note = 2'-O-methyl modified nucleotide
  modified_base 42: mod_base = OTHER; note = 2'-O-methyl modified nucleotide
  modified_base 43: mod_base = OTHER; note = 2'-O-methyl modified nucleotide
  modified_base 47: mod_base = OTHER; note = 2'-O-methyl modified nucleotide
  modified_base 48: mod_base = OTHER; note = 2'-O-methyl modified nucleotide
  modified_base 51: mod_base = OTHER; note = 2'-O-methyl modified nucleotide
  modified_base 54: mod_base = OTHER; note = nucleotide with phosphorothioate linkage
  modified_base 58: mod_base = OTHER; note = 2'-O-methyl modified nucleotide
  modified_base 59: mod_base = OTHER; note = 2'-O-methyl modified nucleotide
  modified_base 61: mod_base = OTHER; note = 2'-O-methyl modified nucleotide
  modified_base 62: mod_base = OTHER; note = 2'-O-methyl modified nucleotide
  modified_base 63: mod_base = OTHER; note = 2'-O-methyl modified nucleotide
  modified_base 64: mod_base = OTHER; note = 2'-O-methyl modified nucleotide
  modified_base 65: mod_base = OTHER; note = 2'-O-methyl modified nucleotide
  modified_base 66: mod_base = OTHER; note = 2'-O-methyl modified nucleotide
  modified_base 67: mod_base = OTHER; note = 2'-O-methyl modified nucleotide
  modified_base 68: mod_base = OTHER; note = 2'-O-methyl modified nucleotide
  modified_base 69: mod_base = OTHER; note = 2'-O-methyl modified nucleotide
  modified_base 70: mod_base = OTHER; note = 2'-O-methyl modified nucleotide
  modified_base 75: mod_base = OTHER; note = 2'-O-methyl modified nucleotide
  modified_base 77: mod_base = OTHER; note = 2'-O-methyl modified nucleotide
  modified_base 80: mod_base = OTHER; note = 2'-O-methyl modified nucleotide
  modified_base 86: mod_base = OTHER; note = 2'-O-methyl modified nucleotide
  modified_base 87: mod_base = OTHER; note = 2'-O-methyl modified nucleotide
  modified_base 89: mod_base = OTHER; note = 2'-O-methyl modified nucleotide
  modified_base 90: mod_base = OTHER; note = 2'-O-methyl modified nucleotide
  modified_base 91: mod_base = OTHER; note = 2'-O-methyl modified nucleotide
  modified_base 92: mod_base = OTHER; note = 2'-O-methyl modified nucleotide
  modified_base 99: mod_base = OTHER; note = nucleotide with phosphorothioate linkage
  modified_base 100: mod_base = OTHER; note = 2'-O-methyl modified nucleotide with phosphorothioate linkage
  modified_base 101: mod_base = OTHER; note = 2'-O-methyl modified nucleotide

SEQ ID NO: 2548 - RNA, 101 nt, synthetic construct; identical to SEQ ID NO: 1548
  source 1..101: mol_type = other RNA
  modified_base 1: mod_base = OTHER; note = 2'-O-methyl modified nucleotide with phosphorothioate linkage
  modified_base 2: mod_base = OTHER; note = 2'-O-methyl modified nucleotide with phosphorothioate linkage
  modified_base 3: mod_base = OTHER; note = 2'-O-methyl modified nucleotide with phosphorothioate linkage
  modified_base 4: mod_base = OTHER; note = 2'-O-methyl modified nucleotide
  modified_base 5: mod_base = OTHER; note = 2'-O-methyl modified nucleotide
  modified_base 8: mod_base = OTHER; note = 2'-O-methyl modified nucleotide
  modified_base 9: mod_base = OTHER; note = 2'-O-methyl modified nucleotide
  modified_base 11: mod_base = OTHER; note = 2'-O-methyl modified nucleotide
  modified_base 13: mod_base = OTHER; note = 2'-O-methyl modified nucleotide
  modified_base 18: mod_base = OTHER; note = 2'-O-methyl modified nucleotide
  modified_base 22: mod_base = OTHER; note = 2'-O-methyl modified nucleotide
  modified_base 25: mod_base = OTHER; note = 2'-O-methyl modified nucleotide
  modified_base 29: mod_base = OTHER; note = 2'-O-methyl modified nucleotide
  modified_base 30: mod_base = OTHER; note = 2'-O-methyl modified nucleotide
  modified_base 31: mod_base = OTHER; note = 2'-O-methyl modified nucleotide
  modified_base 32: mod_base = OTHER; note = 2'-O-methyl modified nucleotide
  modified_base 37: mod_base = OTHER; note = 2'-O-methyl modified nucleotide
  modified_base 38: mod_base = OTHER; note = 2'-O-methyl modified nucleotide
  modified_base 39: mod_base = OTHER; note = 2'-O-methyl modified nucleotide
  modified_base 40: mod_base = OTHER; note = 2'-O-methyl modified nucleotide
  modified_base 41: mod_base = OTHER; note = 2'-O-methyl modified nucleotide
  modified_base 42: mod_base = OTHER; note = 2'-O-methyl modified nucleotide
  modified_base 43: mod_base = OTHER; note = 2'-O-methyl modified nucleotide
  modified_base 47: mod_base = OTHER; note = 2'-O-methyl modified nucleotide
  modified_base 48: mod_base = OTHER; note = 2'-O-methyl modified nucleotide
  modified_base 51: mod_base = OTHER; note = 2'-O-methyl modified nucleotide
  modified_base 54: mod_base = OTHER; note = nucleotide with phosphorothioate linkage
  modified_base 58: mod_base = OTHER; note = 2'-O-methyl modified nucleotide
  modified_base 59: mod_base = OTHER; note = 2'-O-methyl modified nucleotide
  modified_base 61: mod_base = OTHER; note = 2'-O-methyl modified nucleotide
  modified_base 62: mod_base = OTHER; note = 2'-O-methyl modified nucleotide
  modified_base 63: mod_base = OTHER; note = 2'-O-methyl modified nucleotide
  modified_base 64: mod_base = OTHER; note = 2'-O-methyl modified nucleotide
  modified_base 65: mod_base = OTHER; note = 2'-O-methyl modified nucleotide
  modified_base 66: mod_base = OTHER; note = 2'-O-methyl modified nucleotide
  modified_base 67: mod_base = OTHER; note = 2'-O-methyl modified nucleotide
  modified_base 68: mod_base = OTHER; note = 2'-O-methyl modified nucleotide
  modified_base 69: mod_base = OTHER; note = 2'-O-methyl modified nucleotide
  modified_base 70: mod_base = OTHER; note = 2'-O-methyl modified nucleotide
  modified_base 75: mod_base = OTHER; note = 2'-O-methyl modified nucleotide
  modified_base 77: mod_base = OTHER; note = 2'-O-methyl modified nucleotide
  modified_base 80: mod_base = OTHER; note = 2'-O-methyl modified nucleotide
  modified_base 86: mod_base = OTHER; note = 2'-O-methyl modified nucleotide
  modified_base 87: mod_base = OTHER; note = 2'-O-methyl modified nucleotide
  modified_base 89: mod_base = OTHER; note = 2'-O-methyl modified nucleotide
  modified_base 90: mod_base = OTHER; note = 2'-O-methyl modified nucleotide
  modified_base 91: mod_base = OTHER; note = 2'-O-methyl modified nucleotide
  modified_base 92: mod_base = OTHER; note = 2'-O-methyl modified nucleotide
  modified_base 99: mod_base = OTHER; note = nucleotide with phosphorothioate linkage
  modified_base 100: mod_base = OTHER; note = 2'-O-methyl modified nucleotide with phosphorothioate linkage
  modified_base 101: mod_base = OTHER; note = 2'-O-methyl modified nucleotide

SEQ ID NO: 2549 - RNA, 101 nt, synthetic construct; identical to SEQ ID NO: 1549
  source 1..101: mol_type = other RNA
  modified_base 1: mod_base = OTHER; note = 2'-O-methyl modified nucleotide with phosphorothioate linkage
  modified_base 2: mod_base = OTHER; note = 2'-O-methyl modified nucleotide with phosphorothioate linkage
  modified_base 3: mod_base = OTHER; note = 2'-O-methyl modified nucleotide with phosphorothioate linkage
  modified_base 4: mod_base = OTHER; note = 2'-O-methyl modified nucleotide
  modified_base 5: mod_base = OTHER; note = 2'-O-methyl modified nucleotide
  modified_base 8: mod_base = OTHER; note = 2'-O-methyl modified nucleotide
  modified_base 9: mod_base = OTHER; note = 2'-O-methyl modified nucleotide
  modified_base 11: mod_base = OTHER; note = 2'-O-methyl modified nucleotide
  modified_base 13: mod_base = OTHER; note = 2'-O-methyl modified nucleotide
  modified_base 18: mod_base = OTHER; note = 2'-O-methyl modified nucleotide
  modified_base 22: mod_base = OTHER; note = 2'-O-methyl modified nucleotide
  modified_base 25: mod_base = OTHER; note = 2'-O-methyl modified nucleotide
  modified_base 29: mod_base = OTHER; note = 2'-O-methyl modified nucleotide
  modified_base 30: mod_base = OTHER; note = 2'-O-methyl modified nucleotide
  modified_base 31: mod_base = OTHER; note = 2'-O-methyl modified nucleotide
  modified_base 32: mod_base = OTHER; note = 2'-O-methyl modified nucleotide
  modified_base 37: mod_base = OTHER; note = 2'-O-methyl modified nucleotide
  modified_base 38: mod_base = OTHER; note = 2'-O-methyl modified nucleotide
  modified_base 39: mod_base = OTHER; note = 2'-O-methyl modified nucleotide
  modified_base 40: mod_base = OTHER; note = 2'-O-methyl modified nucleotide
  modified_base 41: mod_base = OTHER; note = 2'-O-methyl modified nucleotide
  modified_base 42: mod_base = OTHER; note = 2'-O-methyl modified nucleotide
  modified_base 43: mod_base = OTHER; note = 2'-O-methyl modified nucleotide
  modified_base 47: mod_base = OTHER; note = 2'-O-methyl modified nucleotide
  modified_base 48: mod_base = OTHER; note = 2'-O-methyl modified nucleotide
  modified_base 51: mod_base = OTHER; note = 2'-O-methyl modified nucleotide
  modified_base 54: mod_base = OTHER; note = nucleotide with phosphorothioate linkage
  modified_base 58: mod_base = OTHER; note = 2'-O-methyl modified nucleotide
  modified_base 59: mod_base = OTHER; note = 2'-O-methyl modified nucleotide
  modified_base 61: mod_base = OTHER; note = 2'-O-methyl modified nucleotide
  modified_base 62: mod_base = OTHER; note = 2'-O-methyl modified nucleotide
  modified_base 63: mod_base = OTHER; note = 2'-O-methyl modified nucleotide
  modified_base 64: mod_base = OTHER; note = 2'-O-methyl modified nucleotide
  modified_base 65: mod_base = OTHER; note = 2'-O-methyl modified nucleotide
  modified_base 66: mod_base = OTHER; note = 2'-O-methyl modified nucleotide
  modified_base 67: mod_base = OTHER; note = 2'-O-methyl modified nucleotide
  modified_base 68: mod_base = OTHER; note = 2'-O-methyl modified nucleotide
  modified_base 69: mod_base = OTHER; note = 2'-O-methyl modified nucleotide
  modified_base 70: mod_base = OTHER; note = 2'-O-methyl modified nucleotide
  modified_base 75: mod_base = OTHER; note = 2'-O-methyl modified nucleotide
  modified_base 77: mod_base = OTHER; note = 2'-O-methyl modified nucleotide
  modified_base 80: mod_base = OTHER; note = 2'-O-methyl modified nucleotide
  modified_base 86: mod_base = OTHER; note = 2'-O-methyl modified nucleotide
  modified_base 87: mod_base = OTHER; note = 2'-O-methyl modified nucleotide
  modified_base 89: mod_base = OTHER; note = 2'-O-methyl modified nucleotide
  modified_base 90: mod_base = OTHER; note = 2'-O-methyl modified nucleotide
  modified_base 91: mod_base = OTHER; note = 2'-O-methyl modified nucleotide
  modified_base 92: mod_base = OTHER; note = 2'-O-methyl modified nucleotide
  modified_base 99: mod_base = OTHER; note = nucleotide with phosphorothioate linkage
  modified_base 100: mod_base = OTHER; note = 2'-O-methyl modified nucleotide with phosphorothioate linkage
  modified_base 101: mod_base = OTHER; note = 2'-O-methyl modified nucleotide

SEQ ID NO: 2550 - RNA, 101 nt, synthetic construct; identical to SEQ ID NO: 1550
  source 1..101: mol_type = other RNA
  modified_base 1: mod_base = OTHER; note = 2'-O-methyl modified nucleotide with phosphorothioate linkage
  modified_base 2: mod_base = OTHER; note = 2'-O-methyl modified nucleotide with phosphorothioate linkage
  modified_base 3: mod_base = OTHER; note = 2'-O-methyl modified nucleotide with phosphorothioate linkage
  modified_base 4: mod_base = OTHER; note = 2'-O-methyl modified nucleotide
  modified_base 5: mod_base = OTHER; note = 2'-O-methyl modified nucleotide
  modified_base 8: mod_base = OTHER; note = 2'-O-methyl modified nucleotide
  modified_base 9: mod_base = OTHER; note = 2'-O-methyl modified nucleotide
  modified_base 11: mod_base = OTHER; note = 2'-O-methyl modified nucleotide
  modified_base 13: mod_base = OTHER; note = 2'-O-methyl modified nucleotide
  modified_base 18: mod_base = OTHER; note = 2'-O-methyl modified nucleotide
  modified_base 22: mod_base = OTHER; note = 2'-O-methyl modified nucleotide
  modified_base 25: mod_base = OTHER; note = 2'-O-methyl modified nucleotide
  modified_base 29: mod_base = OTHER; note = 2'-O-methyl modified nucleotide
  modified_base 30: mod_base = OTHER; note = 2'-O-methyl modified nucleotide
  modified_base 31: mod_base = OTHER; note = 2'-O-methyl modified nucleotide
  modified_base 32: mod_base = OTHER; note = 2'-O-methyl modified nucleotide
  modified_base 37: mod_base = OTHER; note = 2'-O-methyl modified nucleotide
  modified_base 38: mod_base = OTHER; note = 2'-O-methyl modified nucleotide
  modified_base 39: mod_base = OTHER; note = 2'-O-methyl modified nucleotide
  modified_base 40: mod_base = OTHER; note = 2'-O-methyl modified nucleotide
  modified_base 41: mod_base = OTHER; note = 2'-O-methyl modified nucleotide
  modified_base 42: mod_base = OTHER; note = 2'-O-methyl modified nucleotide
  modified_base 43: mod_base = OTHER; note = 2'-O-methyl modified nucleotide
  modified_base 47: mod_base = OTHER; note = 2'-O-methyl modified nucleotide
  modified_base 48: mod_base = OTHER; note = 2'-O-methyl modified nucleotide
  modified_base 51: mod_base = OTHER; note = 2'-O-methyl modified nucleotide
  modified_base 54: mod_base = OTHER; note = nucleotide with phosphorothioate linkage
  modified_base 58: mod_base = OTHER; note = 2'-O-methyl modified nucleotide
  modified_base 59: mod_base = OTHER; note = 2'-O-methyl modified nucleotide
  modified_base 61: mod_base = OTHER; note = 2'-O-methyl modified nucleotide
  modified_base 62: mod_base = OTHER; note = 2'-O-methyl modified nucleotide
  modified_base 63: mod_base = OTHER; note = 2'-O-methyl modified nucleotide
  modified_base 64: mod_base = OTHER; note = 2'-O-methyl modified nucleotide
  modified_base 65: mod_base = OTHER; note = 2'-O-methyl modified nucleotide
  modified_base 66: mod_base = OTHER; note = 2'-O-methyl modified nucleotide
  modified_base 67: mod_base = OTHER; note = 2'-O-methyl modified nucleotide
  modified_base 68: mod_base = OTHER; note = 2'-O-methyl modified nucleotide
  modified_base 69: mod_base = OTHER; note = 2'-O-methyl modified nucleotide
  modified_base 70: mod_base = OTHER; note = 2'-O-methyl modified nucleotide
  modified_base 75: mod_base = OTHER; note = 2'-O-methyl modified nucleotide
  modified_base 77: mod_base = OTHER; note = 2'-O-methyl modified nucleotide
  modified_base 80: mod_base = OTHER; note = 2'-O-methyl modified nucleotide
  modified_base 86: mod_base = OTHER; note = 2'-O-methyl modified nucleotide
  modified_base 87: mod_base = OTHER; note = 2'-O-methyl modified nucleotide
  modified_base 89: mod_base = OTHER; note = 2'-O-methyl modified nucleotide
  modified_base 90: mod_base = OTHER; note = 2'-O-methyl modified nucleotide
  modified_base 91: mod_base = OTHER; note = 2'-O-methyl modified nucleotide
  modified_base 92: mod_base = OTHER; note = 2'-O-methyl modified nucleotide
  modified_base 99: mod_base = OTHER; note = nucleotide with phosphorothioate linkage
  modified_base 100: mod_base = OTHER; note = 2'-O-methyl modified nucleotide with phosphorothioate linkage
  modified_base 101: mod_base = OTHER; note = 2'-O-methyl modified nucleotide

SEQ ID NO: 2551 - RNA, 101 nt, synthetic construct; identical to SEQ ID NO: 1551
  source 1..101: mol_type = other RNA
  modified_base 1: mod_base = OTHER; note = 2'-O-methyl modified nucleotide with phosphorothioate linkage
  modified_base 2: mod_base = OTHER; note = 2'-O-methyl modified nucleotide with phosphorothioate linkage
  modified_base 3: mod_base = OTHER; note = 2'-O-methyl modified nucleotide with phosphorothioate linkage
  modified_base 4: mod_base = OTHER; note = 2'-O-methyl modified nucleotide
  modified_base 5: mod_base = OTHER; note = 2'-O-methyl modified nucleotide
  modified_base 8: mod_base = OTHER; note = 2'-O-methyl modified nucleotide
  modified_base 9: mod_base = OTHER; note = 2'-O-methyl modified nucleotide
  modified_base 11: mod_base = OTHER; note = 2'-O-methyl modified nucleotide
  modified_base 13: mod_base = OTHER; note = 2'-O-methyl modified nucleotide
  modified_base 18: mod_base = OTHER; note = 2'-O-methyl modified nucleotide
  modified_base 22: mod_base = OTHER; note = 2'-O-methyl modified nucleotide
  modified_base 25: mod_base = OTHER; note = 2'-O-methyl modified nucleotide
  modified_base 29: mod_base = OTHER; note = 2'-O-methyl modified nucleotide
  modified_base 30: mod_base = OTHER; note = 2'-O-methyl modified nucleotide
  modified_base 31: mod_base = OTHER; note = 2'-O-methyl modified nucleotide
  modified_base 32: mod_base = OTHER; note = 2'-O-methyl modified nucleotide
  modified_base 37: mod_base = OTHER; note = 2'-O-methyl modified nucleotide
  modified_base 38: mod_base = OTHER; note = 2'-O-methyl modified nucleotide
  modified_base 39: mod_base = OTHER; note = 2'-O-methyl modified nucleotide
  modified_base 40: mod_base = OTHER; note = 2'-O-methyl modified nucleotide
  modified_base 41: mod_base = OTHER; note = 2'-O-methyl modified nucleotide
  modified_base 42: mod_base = OTHER; note = 2'-O-methyl modified nucleotide
  modified_base 43: mod_base = OTHER; note = 2'-O-methyl modified nucleotide
  modified_base 47: mod_base = OTHER; note = 2'-O-methyl modified nucleotide
  modified_base 48: mod_base = OTHER; note = 2'-O-methyl modified nucleotide
  modified_base 51: mod_base = OTHER; note = 2'-O-methyl modified nucleotide
  modified_base 54: mod_base = OTHER; note = nucleotide with phosphorothioate linkage
  modified_base 58: mod_base = OTHER; note = 2'-O-methyl modified nucleotide
  modified_base 59: mod_base = OTHER; note = 2'-O-methyl modified nucleotide
  modified_base 61: mod_base = OTHER; note = 2'-O-methyl modified nucleotide
  modified_base 62: mod_base = OTHER; note = 2'-O-methyl modified nucleotide
  modified_base 63: mod_base = OTHER; note = 2'-O-methyl modified nucleotide
  modified_base 64: mod_base = OTHER; note = 2'-O-methyl modified nucleotide
  modified_base 65: mod_base = OTHER; note = 2'-O-methyl modified nucleotide
  modified_base 66: mod_base = OTHER; note = 2'-O-methyl modified nucleotide
  modified_base 67: mod_base = OTHER; note = 2'-O-methyl modified nucleotide
  modified_base 68: mod_base = OTHER; note = 2'-O-methyl modified nucleotide
  modified_base 69: mod_base = OTHER; note = 2'-O-methyl modified nucleotide
  modified_base 70: mod_base = OTHER; note = 2'-O-methyl modified nucleotide
  modified_base 75: mod_base = OTHER; note = 2'-O-methyl modified nucleotide
  modified_base 77: mod_base = OTHER; note = 2'-O-methyl modified nucleotide
  modified_base 80: mod_base = OTHER; note = 2'-O-methyl modified nucleotide
  modified_base 86: mod_base = OTHER; note = 2'-O-methyl modified nucleotide
  modified_base 87: mod_base = OTHER; note = 2'-O-methyl modified nucleotide
  modified_base 89: mod_base = OTHER; note = 2'-O-methyl modified nucleotide
  modified_base 90: mod_base = OTHER; note = 2'-O-methyl modified nucleotide
  modified_base 91: mod_base = OTHER; note = 2'-O-methyl modified nucleotide
  modified_base 92: mod_base = OTHER; note = 2'-O-methyl modified nucleotide
  modified_base 99: mod_base = OTHER; note = nucleotide with phosphorothioate linkage
  modified_base 100: mod_base = OTHER; note = 2'-O-methyl modified nucleotide with phosphorothioate linkage
  modified_base 101: mod_base = OTHER; note = 2'-O-methyl modified nucleotide

SEQ ID NO: 2552 - RNA, 101 nt, synthetic construct; identical to SEQ ID NO: 1552
  source 1..101: mol_type = other RNA
  modified_base 1: mod_base = OTHER; note = 2'-O-methyl modified nucleotide with phosphorothioate linkage
  modified_base 2: mod_base = OTHER; note = 2'-O-methyl modified nucleotide with phosphorothioate linkage
  modified_base 3: mod_base = OTHER; note = 2'-O-methyl modified nucleotide with phosphorothioate linkage
  modified_base 4: mod_base = OTHER; note = 2'-O-methyl modified nucleotide
  modified_base 5: mod_base = OTHER; note = 2'-O-methyl modified nucleotide
  modified_base 8: mod_base = OTHER; note = 2'-O-methyl modified nucleotide
  modified_base 9: mod_base = OTHER; note = 2'-O-methyl modified nucleotide
  modified_base 11: mod_base = OTHER; note = 2'-O-methyl modified nucleotide
  modified_base 13: mod_base = OTHER; note = 2'-O-methyl modified nucleotide
  modified_base 18: mod_base = OTHER; note = 2'-O-methyl modified nucleotide
  modified_base 22: mod_base = OTHER; note = 2'-O-methyl modified nucleotide
  modified_base 25: mod_base = OTHER; note = 2'-O-methyl modified nucleotide
  modified_base 29: mod_base = OTHER; note = 2'-O-methyl modified nucleotide
  modified_base 30: mod_base = OTHER; note = 2'-O-methyl modified nucleotide
  modified_base 31: mod_base = OTHER; note = 2'-O-methyl modified nucleotide
  modified_base 32: mod_base = OTHER; note = 2'-O-methyl modified nucleotide
  modified_base 37: mod_base = OTHER; note = 2'-O-methyl modified nucleotide
  modified_base 38: mod_base = OTHER; note = 2'-O-methyl modified nucleotide
  modified_base 39: mod_base = OTHER; note = 2'-O-methyl modified nucleotide
  modified_base 40: mod_base = OTHER; note = 2'-O-methyl modified nucleotide
  modified_base 41: mod_base = OTHER; note = 2'-O-methyl modified nucleotide
  modified_base 42: mod_base = OTHER; note = 2'-O-methyl modified nucleotide
  modified_base 43: mod_base = OTHER; note = 2'-O-methyl modified nucleotide
  modified_base 47: mod_base = OTHER; note = 2'-O-methyl modified nucleotide
  modified_base 48: mod_base = OTHER; note = 2'-O-methyl modified nucleotide
  modified_base 51: mod_base = OTHER; note = 2'-O-methyl modified nucleotide
  modified_base 54: mod_base = OTHER; note = nucleotide with phosphorothioate linkage
  modified_base 58: mod_base = OTHER; note = 2'-O-methyl modified nucleotide
  modified_base 59: mod_base = OTHER; note = 2'-O-methyl modified nucleotide
  modified_base 61: mod_base = OTHER; note = 2'-O-methyl modified nucleotide
  modified_base 62: mod_base = OTHER; note = 2'-O-methyl modified nucleotide
  modified_base 63: mod_base = OTHER; note = 2'-O-methyl modified nucleotide
  modified_base 64: mod_base = OTHER; note = 2'-O-methyl modified nucleotide
  modified_base 65: mod_base = OTHER; note = 2'-O-methyl modified nucleotide
  modified_base 66: mod_base = OTHER; note = 2'-O-methyl modified nucleotide
  modified_base 67: mod_base = OTHER; note = 2'-O-methyl modified nucleotide
  modified_base 68: mod_base = OTHER; note = 2'-O-methyl modified nucleotide
  modified_base 69: mod_base = OTHER; note = 2'-O-methyl modified nucleotide
  modified_base 70: mod_base = OTHER; note = 2'-O-methyl modified nucleotide
  modified_base 75: mod_base = OTHER; note = 2'-O-methyl modified nucleotide
  modified_base 77: mod_base = OTHER; note = 2'-O-methyl modified nucleotide
  modified_base 80: mod_base = OTHER; note = 2'-O-methyl modified nucleotide
  modified_base 86: mod_base = OTHER; note = 2'-O-methyl modified nucleotide
  modified_base 87: mod_base = OTHER; note = 2'-O-methyl modified nucleotide
  modified_base 89: mod_base = OTHER; note = 2'-O-methyl modified nucleotide
  modified_base 90: mod_base = OTHER; note = 2'-O-methyl modified nucleotide
  modified_base 91: mod_base = OTHER; note = 2'-O-methyl modified nucleotide
  modified_base 92: mod_base = OTHER; note = 2'-O-methyl modified nucleotide
  modified_base 99: mod_base = OTHER; note = nucleotide with phosphorothioate linkage
  modified_base 100: mod_base = OTHER; note = 2'-O-methyl modified nucleotide with phosphorothioate linkage
  modified_base 101: mod_base = OTHER; note = 2'-O-methyl modified nucleotide

SEQ ID NO: 2553 - RNA, 101 nt, synthetic construct; identical to SEQ ID NO: 1553
  source 1..101: mol_type = other RNA
  modified_base 1: mod_base = OTHER; note = 2'-O-methyl modified nucleotide with phosphorothioate linkage
  modified_base 2: mod_base = OTHER; note = 2'-O-methyl modified nucleotide with phosphorothioate linkage
  modified_base 3: mod_base = OTHER; note = 2'-O-methyl modified nucleotide with phosphorothioate linkage
  modified_base 4: mod_base = OTHER; note = 2'-O-methyl modified nucleotide
  modified_base 5: mod_base = OTHER; note = 2'-O-methyl modified nucleotide
  modified_base 8: mod_base = OTHER; note = 2'-O-methyl modified nucleotide
  modified_base 9: mod_base = OTHER; note = 2'-O-methyl modified nucleotide
  modified_base 11: mod_base = OTHER; note = 2'-O-methyl modified nucleotide
  modified_base 13: mod_base = OTHER; note = 2'-O-methyl modified nucleotide
  modified_base 18: mod_base = OTHER; note = 2'-O-methyl modified nucleotide
  modified_base 22: mod_base = OTHER; note = 2'-O-methyl modified nucleotide
  modified_base 25: mod_base = OTHER; note = 2'-O-methyl modified nucleotide
  modified_base 29: mod_base = OTHER; note = 2'-O-methyl modified nucleotide
  modified_base 30: mod_base = OTHER; note = 2'-O-methyl modified nucleotide
  modified_base 31: mod_base = OTHER; note = 2'-O-methyl modified nucleotide
  modified_base 32: mod_base = OTHER; note = 2'-O-methyl modified nucleotide
  modified_base 37: mod_base = OTHER; note = 2'-O-methyl modified nucleotide
  modified_base 38: mod_base = OTHER; note = 2'-O-methyl modified nucleotide
  modified_base 39: mod_base = OTHER; note = 2'-O-methyl modified nucleotide
  modified_base 40: mod_base = OTHER; note = 2'-O-methyl modified nucleotide
  modified_base 41: mod_base = OTHER; note = 2'-O-methyl modified nucleotide
  modified_base 42: mod_base = OTHER; note = 2'-O-methyl modified nucleotide
  modified_base 43: mod_base = OTHER; note = 2'-O-methyl modified nucleotide
  modified_base 47: mod_base = OTHER; note = 2'-O-methyl modified nucleotide
  modified_base 48: mod_base = OTHER; note = 2'-O-methyl modified nucleotide
  modified_base 51: mod_base = OTHER; note = 2'-O-methyl modified nucleotide
  modified_base 54: mod_base = OTHER; note = nucleotide with phosphorothioate linkage
  modified_base 58: mod_base = OTHER; note = 2'-O-methyl modified nucleotide
  modified_base 59: mod_base = OTHER; note = 2'-O-methyl modified nucleotide
  modified_base 61: mod_base = OTHER; note = 2'-O-methyl modified nucleotide
  modified_base 62: mod_base = OTHER; note = 2'-O-methyl modified nucleotide
  modified_base 63: mod_base = OTHER; note = 2'-O-methyl modified nucleotide
  modified_base 64: mod_base = OTHER; note = 2'-O-methyl modified nucleotide
  modified_base 65: mod_base = OTHER; note = 2'-O-methyl modified nucleotide
  modified_base 66: mod_base = OTHER; note = 2'-O-methyl modified nucleotide
  modified_base 67: mod_base = OTHER; note = 2'-O-methyl modified nucleotide
  modified_base 68: mod_base = OTHER; note = 2'-O-methyl modified nucleotide
  modified_base 69: mod_base = OTHER; note = 2'-O-methyl modified nucleotide
  modified_base 70: mod_base = OTHER; note = 2'-O-methyl modified nucleotide
  modified_base 75: mod_base = OTHER; note = 2'-O-methyl modified nucleotide
  modified_base 77: mod_base = OTHER; note = 2'-O-methyl modified nucleotide
  modified_base 80: mod_base = OTHER; note = 2'-O-methyl modified nucleotide
  modified_base 86: mod_base = OTHER; note = 2'-O-methyl modified nucleotide
  modified_base 87: mod_base = OTHER; note = 2'-O-methyl modified nucleotide
  modified_base 89: mod_base = OTHER; note = 2'-O-methyl modified nucleotide
  modified_base 90: mod_base = OTHER; note = 2'-O-methyl modified nucleotide
  modified_base 91: mod_base = OTHER; note = 2'-O-methyl modified nucleotide
  modified_base 92: mod_base = OTHER; note = 2'-O-methyl modified nucleotide
  modified_base 99: mod_base = OTHER; note = nucleotide with phosphorothioate linkage
  modified_base 100: mod_base = OTHER; note = 2'-O-methyl modified nucleotide with phosphorothioate linkage
  modified_base 101: mod_base = OTHER; note = 2'-O-methyl modified nucleotide

SEQ ID NO: 2554 - RNA, 101 nt, synthetic construct; identical to SEQ ID NO: 1554
  source 1..101: mol_type = other RNA
  modified_base 1: mod_base = OTHER; note = 2'-O-methyl modified nucleotide with phosphorothioate linkage
  modified_base 2: mod_base = OTHER; note = 2'-O-methyl modified nucleotide with phosphorothioate linkage
  modified_base 3: mod_base = OTHER; note = 2'-O-methyl modified nucleotide with phosphorothioate linkage
  modified_base 4: mod_base = OTHER; note = 2'-O-methyl modified nucleotide
  modified_base 5: mod_base = OTHER; note = 2'-O-methyl modified nucleotide
  modified_base 8: mod_base = OTHER; note = 2'-O-methyl modified nucleotide
  modified_base 9: mod_base = OTHER; note = 2'-O-methyl modified nucleotide
  modified_base 11: mod_base = OTHER; note = 2'-O-methyl modified nucleotide
  modified_base 13: mod_base = OTHER; note = 2'-O-methyl modified nucleotide
  modified_base 18: mod_base = OTHER; note = 2'-O-methyl modified nucleotide
  modified_base 22: mod_base = OTHER; note = 2'-O-methyl modified nucleotide
  modified_base 25: mod_base = OTHER; note = 2'-O-methyl modified nucleotide
  modified_base 29: mod_base = OTHER; note = 2'-O-methyl modified nucleotide
  modified_base 30: mod_base = OTHER; note = 2'-O-methyl modified nucleotide
  modified_base 31: mod_base = OTHER; note = 2'-O-methyl modified nucleotide
  modified_base 32: mod_base = OTHER; note = 2'-O-methyl modified nucleotide
  modified_base 37: mod_base = OTHER; note = 2'-O-methyl modified nucleotide
  modified_base 38: mod_base = OTHER; note = 2'-O-methyl modified nucleotide
  modified_base 39: mod_base = OTHER; note = 2'-O-methyl modified nucleotide
  modified_base 40: mod_base = OTHER; note = 2'-O-methyl modified nucleotide
  modified_base 41: mod_base = OTHER; note = 2'-O-methyl modified nucleotide
  modified_base 42: mod_base = OTHER; note = 2'-O-methyl modified nucleotide
  modified_base 43: mod_base = OTHER; note = 2'-O-methyl modified nucleotide
  modified_base 47: mod_base = OTHER; note = 2'-O-methyl modified nucleotide
  modified_base 48: mod_base = OTHER; note = 2'-O-methyl modified nucleotide
  modified_base 51: mod_base = OTHER; note = 2'-O-methyl modified nucleotide
  modified_base 54: mod_base = OTHER; note = nucleotide with phosphorothioate linkage
  modified_base 58: mod_base = OTHER; note = 2'-O-methyl modified nucleotide
  modified_base 59: mod_base = OTHER; note = 2'-O-methyl modified nucleotide
  modified_base 61: mod_base = OTHER; note = 2'-O-methyl modified nucleotide
  modified_base 62: mod_base = OTHER; note = 2'-O-methyl modified nucleotide
  modified_base 63: mod_base = OTHER; note = 2'-O-methyl modified nucleotide
  modified_base 64: mod_base = OTHER; note = 2'-O-methyl modified nucleotide
  modified_base 65: mod_base = OTHER; note = 2'-O-methyl modified nucleotide
  modified_base 66: mod_base = OTHER; note = 2'-O-methyl modified nucleotide
  modified_base 67: mod_base = OTHER; note = 2'-O-methyl modified nucleotide
  modified_base 68: mod_base = OTHER; note = 2'-O-methyl modified nucleotide
  modified_base 69: mod_base = OTHER; note = 2'-O-methyl modified nucleotide
  modified_base 70: mod_base = OTHER; note = 2'-O-methyl modified nucleotide
  modified_base 75: mod_base = OTHER; note = 2'-O-methyl modified nucleotide
  modified_base 77: mod_base = OTHER; note = 2'-O-methyl modified nucleotide
  modified_base 80: mod_base = OTHER; note = 2'-O-methyl modified nucleotide
  modified_base 86: mod_base = OTHER; note = 2'-O-methyl modified nucleotide
  modified_base 87: mod_base = OTHER; note = 2'-O-methyl modified nucleotide
  modified_base 89: mod_base = OTHER; note = 2'-O-methyl modified nucleotide
  modified_base 90: mod_base = OTHER; note = 2'-O-methyl modified nucleotide
  modified_base 91: mod_base = OTHER; note = 2'-O-methyl modified nucleotide
  modified_base 92: mod_base = OTHER; note = 2'-O-methyl modified nucleotide
  modified_base 99: mod_base = OTHER; note = nucleotide with phosphorothioate linkage
  modified_base 100: mod_base = OTHER; note = 2'-O-methyl modified nucleotide with phosphorothioate linkage
  modified_base 101: mod_base = OTHER; note = 2'-O-methyl modified nucleotide

SEQ ID NO: 2555 - RNA, 101 nt, synthetic construct; identical to SEQ ID NO: 1555
  source 1..101: mol_type = other RNA
  modified_base 1: mod_base = OTHER; note = 2'-O-methyl modified nucleotide with phosphorothioate linkage
  modified_base 2: mod_base = OTHER; note = 2'-O-methyl modified nucleotide with phosphorothioate linkage
  modified_base 3: mod_base = OTHER; note = 2'-O-methyl modified nucleotide with phosphorothioate linkage
  modified_base 4: mod_base = OTHER; note = 2'-O-methyl modified nucleotide
  modified_base 5: mod_base = OTHER; note = 2'-O-methyl modified nucleotide
  modified_base 8: mod_base = OTHER; note = 2'-O-methyl modified nucleotide
  modified_base 9: mod_base = OTHER; note = 2'-O-methyl modified nucleotide
  modified_base 11: mod_base = OTHER; note = 2'-O-methyl modified nucleotide
  modified_base 13: mod_base = OTHER; note = 2'-O-methyl modified nucleotide
  modified_base 18: mod_base = OTHER; note = 2'-O-methyl modified nucleotide
  modified_base 22: mod_base = OTHER; note = 2'-O-methyl modified nucleotide
  modified_base 25: mod_base = OTHER; note = 2'-O-methyl modified nucleotide
  modified_base 29: mod_base = OTHER; note = 2'-O-methyl modified nucleotide
  modified_base 30: mod_base = OTHER; note = 2'-O-methyl modified nucleotide
  modified_base 31: mod_base = OTHER; note = 2'-O-methyl modified nucleotide
  modified_base 32: mod_base = OTHER; note = 2'-O-methyl modified nucleotide
  modified_base 37: mod_base = OTHER; note = 2'-O-methyl modified nucleotide
  modified_base 38: mod_base = OTHER; note = 2'-O-methyl modified nucleotide
  modified_base 39: mod_base = OTHER; note = 2'-O-methyl modified nucleotide
  modified_base 40: mod_base = OTHER; note = 2'-O-methyl modified nucleotide
  modified_base 41: mod_base = OTHER; note = 2'-O-methyl modified nucleotide
  modified_base 42: mod_base = OTHER; note = 2'-O-methyl modified nucleotide
  modified_base 43: mod_base = OTHER; note = 2'-O-methyl modified nucleotide
  modified_base 47: mod_base = OTHER; note = 2'-O-methyl modified nucleotide
  modified_base 48: mod_base = OTHER; note = 2'-O-methyl modified nucleotide
  modified_base 51: mod_base = OTHER; note = 2'-O-methyl modified nucleotide
  modified_base 54: mod_base = OTHER; note = nucleotide with phosphorothioate linkage
  modified_base 58: mod_base = OTHER; note = 2'-O-methyl modified nucleotide
  modified_base 59: mod_base = OTHER; note = 2'-O-methyl modified nucleotide
  modified_base 61: mod_base = OTHER; note = 2'-O-methyl modified nucleotide
  modified_base 62: mod_base = OTHER; note = 2'-O-methyl modified nucleotide
  modified_base 63: mod_base = OTHER; note = 2'-O-methyl modified nucleotide
  modified_base 64: mod_base = OTHER; note = 2'-O-methyl modified nucleotide
  modified_base 65: mod_base = OTHER; note = 2'-O-methyl modified nucleotide
  modified_base 66: mod_base = OTHER; note = 2'-O-methyl modified nucleotide
  modified_base 67: mod_base = OTHER; note = 2'-O-methyl modified nucleotide
  modified_base 68: mod_base = OTHER; note = 2'-O-methyl modified nucleotide
  modified_base 69: mod_base = OTHER; note = 2'-O-methyl modified nucleotide
  modified_base 70: mod_base = OTHER; note = 2'-O-methyl modified nucleotide
  modified_base 75: mod_base = OTHER; note = 2'-O-methyl modified nucleotide
  modified_base 77: mod_base = OTHER; note = 2'-O-methyl modified nucleotide
  modified_base 80: mod_base = OTHER; note = 2'-O-methyl modified nucleotide
  modified_base 86: mod_base = OTHER; note = 2'-O-methyl modified nucleotide
  modified_base 87: mod_base = OTHER; note = 2'-O-methyl modified nucleotide
  modified_base 89: mod_base = OTHER; note = 2'-O-methyl modified nucleotide
  modified_base 90: mod_base = OTHER; note = 2'-O-methyl modified nucleotide
  modified_base 91: mod_base = OTHER; note = 2'-O-methyl modified nucleotide
  modified_base 92: mod_base = OTHER; note = 2'-O-methyl modified nucleotide
  modified_base 99: mod_base = OTHER; note = nucleotide with phosphorothioate linkage
  modified_base 100: mod_base = OTHER; note = 2'-O-methyl modified nucleotide with phosphorothioate linkage
  modified_base 101: mod_base = OTHER; note = 2'-O-methyl modified nucleotide

SEQ ID NO: 2556 - RNA, 101 nt, synthetic construct; identical to SEQ ID NO: 1556
  source 1..101: mol_type = other RNA
  modified_base 1: mod_base = OTHER; note = 2'-O-methyl modified nucleotide with phosphorothioate linkage
  modified_base 2: mod_base = OTHER; note = 2'-O-methyl modified nucleotide with phosphorothioate linkage
  modified_base 3: mod_base = OTHER; note = 2'-O-methyl modified nucleotide with phosphorothioate linkage
  modified_base 4: mod_base = OTHER; note = 2'-O-methyl modified nucleotide
  modified_base 5: mod_base = OTHER; note = 2'-O-methyl modified nucleotide
  modified_base 8: mod_base = OTHER; note = 2'-O-methyl modified nucleotide
  modified_base 9: mod_base = OTHER; note = 2'-O-methyl modified nucleotide
  modified_base 11: mod_base = OTHER; note = 2'-O-methyl modified nucleotide
  modified_base 13: mod_base = OTHER; note = 2'-O-methyl modified nucleotide
  modified_base 18: mod_base = OTHER; note = 2'-O-methyl modified nucleotide
  modified_base 22: mod_base = OTHER; note = 2'-O-methyl modified nucleotide
  modified_base 25: mod_base = OTHER; note = 2'-O-methyl modified nucleotide
  modified_base 29: mod_base = OTHER; note = 2'-O-methyl modified nucleotide
  modified_base 30: mod_base = OTHER; note = 2'-O-methyl modified nucleotide
  modified_base 31: mod_base = OTHER; note = 2'-O-methyl modified nucleotide
  modified_base 32: mod_base = OTHER; note = 2'-O-methyl modified nucleotide
  modified_base 37: mod_base = OTHER; note = 2'-O-methyl modified nucleotide
  modified_base 38: mod_base = OTHER; note = 2'-O-methyl modified nucleotide
  modified_base 39: mod_base = OTHER; note = 2'-O-methyl modified nucleotide
  modified_base 40: mod_base = OTHER; note = 2'-O-methyl modified nucleotide
  modified_base 41: mod_base = OTHER; note = 2'-O-methyl modified nucleotide
  modified_base 42: mod_base = OTHER; note = 2'-O-methyl modified nucleotide
  modified_base 43: mod_base = OTHER; note = 2'-O-methyl modified nucleotide
  modified_base 47: mod_base = OTHER; note = 2'-O-methyl modified nucleotide
  modified_base 48: mod_base = OTHER; note = 2'-O-methyl modified nucleotide
  modified_base 51: mod_base = OTHER; note = 2'-O-methyl modified nucleotide
  modified_base 54: mod_base = OTHER; note = nucleotide with phosphorothioate linkage
  modified_base 58: mod_base = OTHER; note = 2'-O-methyl modified nucleotide
  modified_base 59: mod_base = OTHER; note = 2'-O-methyl modified nucleotide
  modified_base 61: mod_base = OTHER; note = 2'-O-methyl modified nucleotide
  modified_base 62: mod_base = OTHER; note = 2'-O-methyl modified nucleotide
  modified_base 63: mod_base = OTHER; note = 2'-O-methyl modified nucleotide
  modified_base 64: mod_base = OTHER; note = 2'-O-methyl modified nucleotide
  modified_base 65: mod_base = OTHER; note = 2'-O-methyl modified nucleotide
  modified_base 66: mod_base = OTHER; note = 2'-O-methyl modified nucleotide
  modified_base 67: mod_base = OTHER; note = 2'-O-methyl modified nucleotide
  modified_base 68: mod_base = OTHER; note = 2'-O-methyl modified nucleotide
  modified_base 69: mod_base = OTHER; note = 2'-O-methyl modified nucleotide
  modified_base 70: mod_base = OTHER; note = 2'-O-methyl modified nucleotide
  modified_base 75: mod_base = OTHER; note = 2'-O-methyl modified nucleotide
  modified_base 77: mod_base = OTHER; note = 2'-O-methyl modified nucleotide
  modified_base 80: mod_base = OTHER; note = 2'-O-methyl modified nucleotide
  modified_base 86: mod_base = OTHER; note = 2'-O-methyl modified nucleotide
  modified_base 87: mod_base = OTHER; note = 2'-O-methyl modified nucleotide
  modified_base 89: mod_base = OTHER; note = 2'-O-methyl modified nucleotide
  modified_base 90: mod_base = OTHER; note = 2'-O-methyl modified nucleotide
  modified_base 91: mod_base = OTHER; note = 2'-O-methyl modified nucleotide
  modified_base 92: mod_base = OTHER; note = 2'-O-methyl modified nucleotide
  modified_base 99: mod_base = OTHER; note = nucleotide with phosphorothioate linkage
  modified_base 100: mod_base = OTHER; note = 2'-O-methyl modified nucleotide with phosphorothioate linkage
  modified_base 101: mod_base = OTHER; note = 2'-O-methyl modified nucleotide

SEQ ID NO: 2557 - RNA, 101 nt, synthetic construct; identical to SEQ ID NO: 1557
  source 1..101: mol_type = other RNA
  modified_base 1: mod_base = OTHER; note = 2'-O-methyl modified nucleotide with phosphorothioate linkage
  modified_base 2: mod_base = OTHER; note = 2'-O-methyl modified nucleotide with phosphorothioate linkage
  modified_base 3: mod_base = OTHER; note = 2'-O-methyl modified nucleotide with phosphorothioate linkage
  modified_base 4: mod_base = OTHER; note = 2'-O-methyl modified nucleotide
  modified_base 5: mod_base = OTHER; note = 2'-O-methyl modified nucleotide
  modified_base 8: mod_base = OTHER; note = 2'-O-methyl modified nucleotide
  modified_base 9: mod_base = OTHER; note = 2'-O-methyl modified nucleotide
  modified_base 11: mod_base = OTHER; note = 2'-O-methyl modified nucleotide
  modified_base 13: mod_base = OTHER; note = 2'-O-methyl modified nucleotide
  modified_base 18: mod_base = OTHER; note = 2'-O-methyl modified nucleotide
  modified_base 22: mod_base = OTHER; note = 2'-O-methyl modified nucleotide
  modified_base 25: mod_base = OTHER; note = 2'-O-methyl modified nucleotide
  modified_base 29: mod_base = OTHER; note = 2'-O-methyl modified nucleotide
  modified_base 30: mod_base = OTHER; note = 2'-O-methyl modified nucleotide
  modified_base 31: mod_base = OTHER; note = 2'-O-methyl modified nucleotide
  modified_base 32: mod_base = OTHER; note = 2'-O-methyl modified nucleotide
  modified_base 37: mod_base = OTHER; note = 2'-O-methyl modified nucleotide
  modified_base 38: mod_base = OTHER; note = 2'-O-methyl modified nucleotide
  modified_base 39: mod_base = OTHER; note = 2'-O-methyl modified nucleotide
  modified_base 40: mod_base = OTHER; note = 2'-O-methyl modified nucleotide
  modified_base 41: mod_base = OTHER; note = 2'-O-methyl modified nucleotide
  modified_base 42: mod_base = OTHER; note = 2'-O-methyl modified nucleotide
  modified_base 43: mod_base = OTHER; note = 2'-O-methyl modified nucleotide
  modified_base 47: mod_base = OTHER; note = 2'-O-methyl modified nucleotide
  modified_base 48: mod_base = OTHER; note = 2'-O-methyl modified nucleotide
  modified_base 51: mod_base = OTHER; note = 2'-O-methyl modified nucleotide
  modified_base 54: mod_base = OTHER; note = nucleotide with phosphorothioate linkage
  modified_base 58: mod_base = OTHER; note = 2'-O-methyl modified nucleotide
  modified_base 59: mod_base = OTHER; note = 2'-O-methyl modified nucleotide
  modified_base 61: mod_base = OTHER; note = 2'-O-methyl modified nucleotide
  modified_base 62: mod_base = OTHER; note = 2'-O-methyl modified nucleotide
  modified_base 63: mod_base = OTHER; note = 2'-O-methyl modified nucleotide
  modified_base 64: mod_base = OTHER; note = 2'-O-methyl modified nucleotide
  modified_base 65: mod_base = OTHER; note = 2'-O-methyl modified nucleotide
  modified_base 66: mod_base = OTHER; note = 2'-O-methyl modified nucleotide
  modified_base 67: mod_base = OTHER; note = 2'-O-methyl modified nucleotide
  modified_base 68: mod_base = OTHER; note = 2'-O-methyl modified nucleotide
  modified_base 69: mod_base = OTHER; note = 2'-O-methyl modified nucleotide
  modified_base 70: mod_base = OTHER; note = 2'-O-methyl modified nucleotide
  modified_base 75: mod_base = OTHER; note = 2'-O-methyl modified nucleotide
  modified_base 77: mod_base = OTHER; note = 2'-O-methyl modified nucleotide
  modified_base 80: mod_base = OTHER; note = 2'-O-methyl modified nucleotide
  modified_base 86: mod_base = OTHER; note = 2'-O-methyl modified nucleotide
  modified_base 87: mod_base = OTHER; note = 2'-O-methyl modified nucleotide
  modified_base 89: mod_base = OTHER; note = 2'-O-methyl modified nucleotide
  modified_base 90: mod_base = OTHER; note = 2'-O-methyl modified nucleotide
  modified_base 91: mod_base = OTHER; note = 2'-O-methyl modified nucleotide
  modified_base 92: mod_base = OTHER; note = 2'-O-methyl modified nucleotide
  modified_base 99: mod_base = OTHER; note = nucleotide with phosphorothioate linkage
  modified_base 100: mod_base = OTHER; note = 2'-O-methyl modified nucleotide with phosphorothioate linkage
  modified_base 101: mod_base = OTHER; note = 2'-O-methyl modified nucleotide

SEQ ID NO: 2558 - RNA, 101 nt, synthetic construct; identical to SEQ ID NO: 1558
  source 1..101: mol_type = other RNA
  modified_base 1: mod_base = OTHER; note = 2'-O-methyl modified nucleotide with phosphorothioate linkage
  modified_base 2: mod_base = OTHER; note = 2'-O-methyl modified nucleotide with phosphorothioate linkage
  modified_base 3: mod_base = OTHER; note = 2'-O-methyl modified nucleotide with phosphorothioate linkage
  modified_base 4: mod_base = OTHER; note = 2'-O-methyl modified nucleotide
  modified_base 5: mod_base = OTHER; note = 2'-O-methyl modified nucleotide
  modified_base 8: mod_base = OTHER; note = 2'-O-methyl modified nucleotide
  modified_base 9: mod_base = OTHER; note = 2'-O-methyl modified nucleotide
  modified_base 11: mod_base = OTHER; note = 2'-O-methyl modified nucleotide
  modified_base 13: mod_base = OTHER; note = 2'-O-methyl modified nucleotide
  modified_base 18: mod_base = OTHER; note = 2'-O-methyl modified nucleotide
  modified_base 22: mod_base = OTHER; note = 2'-O-methyl modified nucleotide
  modified_base 25: mod_base = OTHER; note = 2'-O-methyl modified nucleotide
  modified_base 29: mod_base = OTHER; note = 2'-O-methyl modified nucleotide
  modified_base 30: mod_base = OTHER; note = 2'-O-methyl modified nucleotide
  modified_base 31: mod_base = OTHER; note = 2'-O-methyl modified nucleotide
  modified_base 32: mod_base = OTHER; note = 2'-O-methyl modified nucleotide
  modified_base 37: mod_base = OTHER; note = 2'-O-methyl modified nucleotide
  modified_base 38: mod_base = OTHER; note = 2'-O-methyl modified nucleotide
  modified_base 39: mod_base = OTHER; note = 2'-O-methyl modified nucleotide
  modified_base 40: mod_base = OTHER; note = 2'-O-methyl modified nucleotide
  modified_base 41: mod_base = OTHER; note = 2'-O-methyl modified nucleotide
  modified_base 42: mod_base = OTHER; note = 2'-O-methyl modified nucleotide
  modified_base 43: mod_base = OTHER; note = 2'-O-methyl modified nucleotide
  modified_base 47: mod_base = OTHER; note = 2'-O-methyl modified nucleotide
  modified_base 48: mod_base = OTHER; note = 2'-O-methyl modified nucleotide
  modified_base 51: mod_base = OTHER; note = 2'-O-methyl modified nucleotide
  modified_base 54: mod_base = OTHER; note = nucleotide with phosphorothioate linkage
  modified_base 58: mod_base = OTHER; note = 2'-O-methyl modified nucleotide
  modified_base 59: mod_base = OTHER; note = 2'-O-methyl modified nucleotide
  modified_base 61: mod_base = OTHER; note = 2'-O-methyl modified nucleotide
  modified_base 62: mod_base = OTHER; note = 2'-O-methyl modified nucleotide
  modified_base 63: mod_base = OTHER; note = 2'-O-methyl modified nucleotide
  modified_base 64: mod_base = OTHER; note = 2'-O-methyl modified nucleotide
  modified_base 65: mod_base = OTHER; note = 2'-O-methyl modified nucleotide
  modified_base 66: mod_base = OTHER; note = 2'-O-methyl modified nucleotide
  modified_base 67: mod_base = OTHER; note = 2'-O-methyl modified nucleotide
  modified_base 68: mod_base = OTHER; note = 2'-O-methyl modified nucleotide
  modified_base 69: mod_base = OTHER; note = 2'-O-methyl modified nucleotide
  modified_base 70: mod_base = OTHER; note = 2'-O-methyl modified nucleotide
  modified_base 75: mod_base = OTHER; note = 2'-O-methyl modified nucleotide
  modified_base 77: mod_base = OTHER; note = 2'-O-methyl modified nucleotide
  modified_base 80: mod_base = OTHER; note = 2'-O-methyl modified nucleotide
  modified_base 86: mod_base = OTHER; note = 2'-O-methyl modified nucleotide
  modified_base 87: mod_base = OTHER; note = 2'-O-methyl modified nucleotide
  modified_base 89: mod_base = OTHER; note = 2'-O-methyl modified nucleotide
  modified_base 90: mod_base = OTHER; note = 2'-O-methyl modified nucleotide
  modified_base 91: mod_base = OTHER; note = 2'-O-methyl modified nucleotide
  modified_base 92: mod_base = OTHER; note = 2'-O-methyl modified nucleotide
  modified_base 99: mod_base = OTHER; note = nucleotide with phosphorothioate linkage
  modified_base 100: mod_base = OTHER; note = 2'-O-methyl modified nucleotide with phosphorothioate linkage
  modified_base 101: mod_base = OTHER; note = 2'-O-methyl modified nucleotide

SEQ ID NO: 2559 - RNA, 101 nt, synthetic construct; identical to SEQ ID NO: 1559
  source 1..101: mol_type = other RNA
  modified_base 1: mod_base = OTHER; note = 2'-O-methyl modified nucleotide with phosphorothioate linkage
  modified_base 2: mod_base = OTHER; note = 2'-O-methyl modified nucleotide with phosphorothioate linkage
  modified_base 3: mod_base = OTHER; note = 2'-O-methyl modified nucleotide with phosphorothioate linkage
  modified_base 4: mod_base = OTHER; note = 2'-O-methyl modified nucleotide
  modified_base 5: mod_base = OTHER; note = 2'-O-methyl modified nucleotide
  modified_base 8: mod_base = OTHER; note = 2'-O-methyl modified nucleotide
  modified_base 9: mod_base = OTHER; note = 2'-O-methyl modified nucleotide
  modified_base 11: mod_base = OTHER; note = 2'-O-methyl modified nucleotide
  modified_base 13: mod_base = OTHER; note = 2'-O-methyl modified nucleotide
  modified_base 18: mod_base = OTHER; note = 2'-O-methyl modified nucleotide
  modified_base 22: mod_base = OTHER; note = 2'-O-methyl modified nucleotide
  modified_base 25: mod_base = OTHER; note = 2'-O-methyl modified nucleotide
  modified_base 29: mod_base = OTHER; note = 2'-O-methyl modified nucleotide
  modified_base 30: mod_base = OTHER; note = 2'-O-methyl modified nucleotide
  modified_base 31: mod_base = OTHER; note = 2'-O-methyl modified nucleotide
  modified_base 32: mod_base = OTHER; note = 2'-O-methyl modified nucleotide
  modified_base 37: mod_base = OTHER; note = 2'-O-methyl modified nucleotide
  modified_base 38: mod_base = OTHER; note = 2'-O-methyl modified nucleotide
  modified_base 39: mod_base = OTHER; note = 2'-O-methyl modified nucleotide
  modified_base 40: mod_base = OTHER; note = 2'-O-methyl modified nucleotide
  modified_base 41: mod_base = OTHER; note = 2'-O-methyl modified nucleotide
  modified_base 42: mod_base = OTHER; note = 2'-O-methyl modified nucleotide
  modified_base 43: mod_base = OTHER; note = 2'-O-methyl modified nucleotide
  modified_base 47: mod_base = OTHER; note = 2'-O-methyl modified nucleotide
  modified_base 48: mod_base = OTHER; note = 2'-O-methyl modified nucleotide
  modified_base 51: mod_base = OTHER; note = 2'-O-methyl modified nucleotide
  modified_base 54: mod_base = OTHER; note = nucleotide with phosphorothioate linkage
  modified_base 58: mod_base = OTHER; note = 2'-O-methyl modified nucleotide
  modified_base 59: mod_base = OTHER; note = 2'-O-methyl modified nucleotide
  modified_base 61: mod_base = OTHER; note = 2'-O-methyl modified nucleotide
  modified_base 62: mod_base = OTHER; note = 2'-O-methyl modified nucleotide
  modified_base 63: mod_base = OTHER; note = 2'-O-methyl modified nucleotide
  modified_base 64: mod_base = OTHER; note = 2'-O-methyl modified nucleotide
  modified_base 65: mod_base = OTHER; note = 2'-O-methyl modified nucleotide
  modified_base 66: mod_base = OTHER; note = 2'-O-methyl modified nucleotide
  modified_base 67: mod_base = OTHER; note = 2'-O-methyl modified nucleotide
  modified_base 68: mod_base = OTHER; note = 2'-O-methyl modified nucleotide
  modified_base 69: mod_base = OTHER; note = 2'-O-methyl modified nucleotide
  modified_base 70: mod_base = OTHER; note = 2'-O-methyl modified nucleotide
  modified_base 75: mod_base = OTHER; note = 2'-O-methyl modified nucleotide
  modified_base 77: mod_base = OTHER; note = 2'-O-methyl modified nucleotide
  modified_base 80: mod_base = OTHER; note = 2'-O-methyl modified nucleotide
  modified_base 86: mod_base = OTHER; note = 2'-O-methyl modified nucleotide
  modified_base 87: mod_base = OTHER; note = 2'-O-methyl modified nucleotide
  modified_base 89: mod_base = OTHER; note = 2'-O-methyl modified nucleotide
  modified_base 90: mod_base = OTHER; note = 2'-O-methyl modified nucleotide
  modified_base 91: mod_base = OTHER; note = 2'-O-methyl modified nucleotide
  modified_base 92: mod_base = OTHER; note = 2'-O-methyl modified nucleotide
  modified_base 99: mod_base = OTHER; note = nucleotide with phosphorothioate linkage
  modified_base 100: mod_base = OTHER; note = 2'-O-methyl modified nucleotide with phosphorothioate linkage
  modified_base 101: mod_base = OTHER; note = 2'-O-methyl modified nucleotide

SEQ ID NO: 2560 - RNA, 101 nt, synthetic construct; identical to SEQ ID NO: 1560
  source 1..101: mol_type = other RNA
  modified_base 1: mod_base = OTHER; note = 2'-O-methyl modified nucleotide with phosphorothioate linkage
  modified_base 2: mod_base = OTHER; note = 2'-O-methyl modified nucleotide with phosphorothioate linkage
  modified_base 3: mod_base = OTHER; note = 2'-O-methyl modified nucleotide with phosphorothioate linkage
  modified_base 4: mod_base = OTHER; note = 2'-O-methyl modified nucleotide
  modified_base 5: mod_base = OTHER; note = 2'-O-methyl modified nucleotide
  modified_base 8: mod_base = OTHER; note = 2'-O-methyl modified nucleotide
  modified_base 9: mod_base = OTHER; note = 2'-O-methyl modified nucleotide
  modified_base 11: mod_base = OTHER; note = 2'-O-methyl modified nucleotide
  modified_base 13: mod_base = OTHER; note = 2'-O-methyl modified nucleotide
  modified_base 18: mod_base = OTHER; note = 2'-O-methyl modified nucleotide
  modified_base 22: mod_base = OTHER; note = 2'-O-methyl modified nucleotide
  modified_base 25: mod_base = OTHER; note = 2'-O-methyl modified nucleotide
  modified_base 29: mod_base = OTHER; note = 2'-O-methyl modified nucleotide
  modified_base 30: mod_base = OTHER; note = 2'-O-methyl modified nucleotide
  modified_base 31: mod_base = OTHER; note = 2'-O-methyl modified nucleotide
  modified_base 32: mod_base = OTHER; note = 2'-O-methyl modified nucleotide
  modified_base 37: mod_base = OTHER; note = 2'-O-methyl modified nucleotide
  modified_base 38: mod_base = OTHER; note = 2'-O-methyl modified nucleotide
  modified_base 39: mod_base = OTHER; note = 2'-O-methyl modified nucleotide
  modified_base 40: mod_base = OTHER; note = 2'-O-methyl modified nucleotide
  modified_base 41: mod_base = OTHER; note = 2'-O-methyl modified nucleotide
  modified_base 42: mod_base = OTHER; note = 2'-O-methyl modified nucleotide
  modified_base 43: mod_base = OTHER; note = 2'-O-methyl modified nucleotide
  modified_base 47: mod_base = OTHER; note = 2'-O-methyl modified nucleotide
  modified_base 48: mod_base = OTHER; note = 2'-O-methyl modified nucleotide
  modified_base 51: mod_base = OTHER; note = 2'-O-methyl modified nucleotide
  modified_base 54: mod_base = OTHER; note = nucleotide with phosphorothioate linkage
  modified_base 58: mod_base = OTHER; note = 2'-O-methyl modified nucleotide
  modified_base 59: mod_base = OTHER; note = 2'-O-methyl modified nucleotide
  modified_base 61: mod_base = OTHER; note = 2'-O-methyl modified nucleotide
  modified_base 62: mod_base = OTHER; note = 2'-O-methyl modified nucleotide
  modified_base 63: mod_base = OTHER; note = 2'-O-methyl modified nucleotide
  modified_base 64: mod_base = OTHER; note = 2'-O-methyl modified nucleotide
  modified_base 65: mod_base = OTHER; note = 2'-O-methyl modified nucleotide
  modified_base 66: mod_base = OTHER; note = 2'-O-methyl modified nucleotide
  modified_base 67: mod_base = OTHER; note = 2'-O-methyl modified nucleotide
  modified_base 68: mod_base = OTHER; note = 2'-O-methyl modified nucleotide
  modified_base 69: mod_base = OTHER; note = 2'-O-methyl modified nucleotide
  modified_base 70: mod_base = OTHER; note = 2'-O-methyl modified nucleotide
  modified_base 75: mod_base = OTHER; note = 2'-O-methyl modified nucleotide
  modified_base 77: mod_base = OTHER; note = 2'-O-methyl modified nucleotide
  modified_base 80: mod_base = OTHER; note = 2'-O-methyl modified nucleotide
  modified_base 86: mod_base = OTHER; note = 2'-O-methyl modified nucleotide
  modified_base 87: mod_base = OTHER; note = 2'-O-methyl modified nucleotide
  modified_base 89: mod_base = OTHER; note = 2'-O-methyl modified nucleotide
  modified_base 90: mod_base = OTHER; note = 2'-O-methyl modified nucleotide
  modified_base 91: mod_base = OTHER; note = 2'-O-methyl modified nucleotide
  modified_base 92: mod_base = OTHER; note = 2'-O-methyl modified nucleotide
  modified_base 99: mod_base = OTHER; note = nucleotide with phosphorothioate linkage
  modified_base 100: mod_base = OTHER; note = 2'-O-methyl modified nucleotide with phosphorothioate linkage
  modified_base 101: mod_base = OTHER; note = 2'-O-methyl modified nucleotide

SEQ ID NO: 2561 - RNA, 101 nt, synthetic construct; identical to SEQ ID NO: 1561
  source 1..101: mol_type = other RNA
  modified_base 1: mod_base = OTHER; note = 2'-O-methyl modified nucleotide with phosphorothioate linkage
  modified_base 2: mod_base = OTHER; note = 2'-O-methyl modified nucleotide with phosphorothioate linkage
  modified_base 3: mod_base = OTHER; note = 2'-O-methyl modified nucleotide with phosphorothioate linkage
  modified_base 4: mod_base = OTHER; note = 2'-O-methyl modified nucleotide
  modified_base 5: mod_base = OTHER; note = 2'-O-methyl modified nucleotide
  modified_base 8: mod_base = OTHER; note = 2'-O-methyl modified nucleotide
  modified_base 9: mod_base = OTHER; note = 2'-O-methyl modified nucleotide
  modified_base 11: mod_base = OTHER; note = 2'-O-methyl modified nucleotide
  modified_base 13: mod_base = OTHER; note = 2'-O-methyl modified nucleotide
  modified_base 18: mod_base = OTHER; note = 2'-O-methyl modified nucleotide
  modified_base 22: mod_base = OTHER; note = 2'-O-methyl modified nucleotide
  modified_base 25: mod_base = OTHER; note = 2'-O-methyl modified nucleotide
  modified_base 29: mod_base = OTHER; note = 2'-O-methyl modified nucleotide
  modified_base 30: mod_base = OTHER; note = 2'-O-methyl modified nucleotide
  modified_base 31: mod_base = OTHER; note = 2'-O-methyl modified nucleotide
  modified_base 32: mod_base = OTHER; note = 2'-O-methyl modified nucleotide
  modified_base 37: mod_base = OTHER; note = 2'-O-methyl modified nucleotide
  modified_base 38: mod_base = OTHER; note = 2'-O-methyl modified nucleotide
  modified_base 39: mod_base = OTHER; note = 2'-O-methyl modified nucleotide
  modified_base 40: mod_base = OTHER; note = 2'-O-methyl modified nucleotide
  modified_base 41: mod_base = OTHER; note = 2'-O-methyl modified nucleotide
  modified_base 42: mod_base = OTHER; note = 2'-O-methyl modified nucleotide
  modified_base 43: mod_base = OTHER; note = 2'-O-methyl modified nucleotide
  modified_base 47: mod_base = OTHER; note = 2'-O-methyl modified nucleotide
  modified_base 48: mod_base = OTHER; note = 2'-O-methyl modified nucleotide
  modified_base 51: mod_base = OTHER; note = 2'-O-methyl modified nucleotide
  modified_base 54: mod_base = OTHER; note = nucleotide with phosphorothioate linkage
  modified_base 58: mod_base = OTHER; note = 2'-O-methyl modified nucleotide
  modified_base 59: mod_base = OTHER; note = 2'-O-methyl modified nucleotide
  modified_base 61: mod_base = OTHER; note = 2'-O-methyl modified nucleotide
  modified_base 62: mod_base = OTHER; note = 2'-O-methyl modified nucleotide
  modified_base 63: mod_base = OTHER; note = 2'-O-methyl modified nucleotide
  modified_base 64: mod_base = OTHER; note = 2'-O-methyl modified nucleotide
  modified_base 65: mod_base = OTHER; note = 2'-O-methyl modified nucleotide
  modified_base 66: mod_base = OTHER; note = 2'-O-methyl modified nucleotide
  modified_base 67: mod_base = OTHER; note = 2'-O-methyl modified nucleotide
  modified_base 68: mod_base = OTHER; note = 2'-O-methyl modified nucleotide
  modified_base 69: mod_base = OTHER; note = 2'-O-methyl modified nucleotide
  modified_base 70: mod_base = OTHER; note = 2'-O-methyl modified nucleotide
  modified_base 75: mod_base = OTHER; note = 2'-O-methyl modified nucleotide
  modified_base 77: mod_base = OTHER; note = 2'-O-methyl modified nucleotide
  modified_base 80: mod_base = OTHER; note = 2'-O-methyl modified nucleotide
  modified_base 86: mod_base = OTHER; note = 2'-O-methyl modified nucleotide
  modified_base 87: mod_base = OTHER; note = 2'-O-methyl modified nucleotide
  modified_base 89: mod_base = OTHER; note = 2'-O-methyl modified nucleotide
  modified_base 90: mod_base = OTHER; note = 2'-O-methyl modified nucleotide
  modified_base 91: mod_base = OTHER; note = 2'-O-methyl modified nucleotide
  modified_base 92: mod_base = OTHER; note = 2'-O-methyl modified nucleotide
  modified_base 99: mod_base = OTHER; note = nucleotide with phosphorothioate linkage
  modified_base 100: mod_base = OTHER; note = 2'-O-methyl modified nucleotide with phosphorothioate linkage
  modified_base 101: mod_base = OTHER; note = 2'-O-methyl modified nucleotide

SEQ ID NO: 2562 - RNA, 101 nt, synthetic construct; identical to SEQ ID NO: 1562
  source 1..101: mol_type = other RNA
  modified_base 1: mod_base = OTHER; note = 2'-O-methyl modified nucleotide with phosphorothioate linkage
  modified_base 2: mod_base = OTHER; note = 2'-O-methyl modified nucleotide with phosphorothioate linkage
  modified_base 3: mod_base = OTHER; note = 2'-O-methyl modified nucleotide with phosphorothioate linkage
  modified_base 4: mod_base = OTHER; note = 2'-O-methyl modified nucleotide
  modified_base 5: mod_base = OTHER; note = 2'-O-methyl modified nucleotide
  modified_base 8: mod_base = OTHER; note = 2'-O-methyl modified nucleotide
  modified_base 9: mod_base = OTHER; note = 2'-O-methyl modified nucleotide
  modified_base 11: mod_base = OTHER; note = 2'-O-methyl modified nucleotide
  modified_base 13: mod_base = OTHER; note = 2'-O-methyl modified nucleotide
  modified_base 18: mod_base = OTHER; note = 2'-O-methyl modified nucleotide
  modified_base 22: mod_base = OTHER; note = 2'-O-methyl modified nucleotide
  modified_base 25: mod_base = OTHER; note = 2'-O-methyl modified nucleotide
  modified_base 29: mod_base = OTHER; note = 2'-O-methyl modified nucleotide
  modified_base 30: mod_base = OTHER; note = 2'-O-methyl modified nucleotide
  modified_base 31: mod_base = OTHER; note = 2'-O-methyl modified nucleotide
  modified_base 32: mod_base = OTHER; note = 2'-O-methyl modified nucleotide
  modified_base 37: mod_base = OTHER; note = 2'-O-methyl modified nucleotide
  modified_base 38: mod_base = OTHER; note = 2'-O-methyl modified nucleotide
  modified_base 39: mod_base = OTHER; note = 2'-O-methyl modified nucleotide
  modified_base 40: mod_base = OTHER; note = 2'-O-methyl modified nucleotide
  modified_base 41: mod_base = OTHER; note = 2'-O-methyl modified nucleotide
  modified_base 42: mod_base = OTHER; note = 2'-O-methyl modified nucleotide
  modified_base 43: mod_base = OTHER; note = 2'-O-methyl modified nucleotide
  modified_base 47: mod_base = OTHER; note = 2'-O-methyl modified nucleotide
  modified_base 48: mod_base = OTHER; note = 2'-O-methyl modified nucleotide
  modified_base 51: mod_base = OTHER; note = 2'-O-methyl modified nucleotide
  modified_base 54: mod_base = OTHER; note = nucleotide with phosphorothioate linkage
  modified_base 58: mod_base = OTHER; note = 2'-O-methyl modified nucleotide
  modified_base 59: mod_base = OTHER; note = 2'-O-methyl modified nucleotide
  modified_base 61: mod_base = OTHER; note = 2'-O-methyl modified nucleotide
  modified_base 62: mod_base = OTHER; note = 2'-O-methyl modified nucleotide
  modified_base 63: mod_base = OTHER; note = 2'-O-methyl modified nucleotide
  modified_base 64: mod_base = OTHER; note = 2'-O-methyl modified nucleotide
  modified_base 65: mod_base = OTHER; note = 2'-O-methyl modified nucleotide
  modified_base 66: mod_base = OTHER; note = 2'-O-methyl modified nucleotide
  modified_base 67: mod_base = OTHER; note = 2'-O-methyl modified nucleotide
  modified_base 68: mod_base = OTHER; note = 2'-O-methyl modified nucleotide
  modified_base 69: mod_base = OTHER; note = 2'-O-methyl modified nucleotide
  modified_base 70: mod_base = OTHER; note = 2'-O-methyl modified nucleotide
  modified_base 75: mod_base = OTHER; note = 2'-O-methyl modified nucleotide
  modified_base 77: mod_base = OTHER; note = 2'-O-methyl modified nucleotide
  modified_base 80: mod_base = OTHER; note = 2'-O-methyl modified nucleotide
  modified_base 86: mod_base = OTHER; note = 2'-O-methyl modified nucleotide
  modified_base 87: mod_base = OTHER; note = 2'-O-methyl modified nucleotide
  modified_base 89: mod_base = OTHER; note = 2'-O-methyl modified nucleotide
  modified_base 90: mod_base = OTHER; note = 2'-O-methyl modified nucleotide
  modified_base 91: mod_base = OTHER; note = 2'-O-methyl modified nucleotide
  modified_base 92: mod_base = OTHER; note = 2'-O-methyl modified nucleotide
  modified_base 99: mod_base = OTHER; note = nucleotide with phosphorothioate linkage
  modified_base 100: mod_base = OTHER; note = 2'-O-methyl modified nucleotide with phosphorothioate linkage
  modified_base 101: mod_base = OTHER; note = 2'-O-methyl modified nucleotide

SEQ ID NO: 2563 - RNA, 101 nt, synthetic construct; identical to SEQ ID NO: 1563
  source 1..101: mol_type = other RNA
  modified_base 1: mod_base = OTHER; note = 2'-O-methyl modified nucleotide with phosphorothioate linkage
  modified_base 2: mod_base = OTHER; note = 2'-O-methyl modified nucleotide with phosphorothioate linkage
  modified_base 3: mod_base = OTHER; note = 2'-O-methyl modified nucleotide with phosphorothioate linkage
  modified_base 4: mod_base = OTHER; note = 2'-O-methyl modified nucleotide
  modified_base 5: mod_base = OTHER; note = 2'-O-methyl modified nucleotide
  modified_base 8: mod_base = OTHER; note = 2'-O-methyl modified nucleotide
  modified_base 9: mod_base = OTHER; note = 2'-O-methyl modified nucleotide
  modified_base 11: mod_base = OTHER; note = 2'-O-methyl modified nucleotide
  modified_base 13: mod_base = OTHER; note = 2'-O-methyl modified nucleotide
  modified_base 18: mod_base = OTHER; note = 2'-O-methyl modified nucleotide
  modified_base 22: mod_base = OTHER; note = 2'-O-methyl modified nucleotide
  modified_base 25: mod_base = OTHER; note = 2'-O-methyl modified nucleotide
  modified_base 29: mod_base = OTHER; note = 2'-O-methyl modified nucleotide
  modified_base 30: mod_base = OTHER; note = 2'-O-methyl modified nucleotide
  modified_base 31: mod_base = OTHER; note = 2'-O-methyl modified nucleotide
  modified_base 32: mod_base = OTHER; note = 2'-O-methyl modified nucleotide
  modified_base 37: mod_base = OTHER; note = 2'-O-methyl modified nucleotide
  modified_base 38: mod_base = OTHER; note = 2'-O-methyl modified nucleotide
  modified_base 39: mod_base = OTHER; note = 2'-O-methyl modified nucleotide
  modified_base 40: mod_base = OTHER; note = 2'-O-methyl modified nucleotide
  modified_base 41: mod_base = OTHER; note = 2'-O-methyl modified nucleotide
  modified_base 42: mod_base = OTHER; note = 2'-O-methyl modified nucleotide
  modified_base 43: mod_base = OTHER; note = 2'-O-methyl modified nucleotide
  modified_base 47: mod_base = OTHER; note = 2'-O-methyl modified nucleotide
  modified_base 48: mod_base = OTHER; note = 2'-O-methyl modified nucleotide
  modified_base 51: mod_base = OTHER; note = 2'-O-methyl modified nucleotide
  modified_base 54: mod_base = OTHER; note = nucleotide with phosphorothioate linkage
  modified_base 58: mod_base = OTHER; note = 2'-O-methyl modified nucleotide
  modified_base 59: mod_base = OTHER; note = 2'-O-methyl modified nucleotide
  modified_base 61: mod_base = OTHER; note = 2'-O-methyl modified nucleotide
  modified_base 62: mod_base = OTHER; note = 2'-O-methyl modified nucleotide
  modified_base 63: mod_base = OTHER; note = 2'-O-methyl modified nucleotide
  modified_base 64: mod_base = OTHER; note = 2'-O-methyl modified nucleotide
  modified_base 65: mod_base = OTHER; note = 2'-O-methyl modified nucleotide
  modified_base 66: mod_base = OTHER; note = 2'-O-methyl modified nucleotide
  modified_base 67: mod_base = OTHER; note = 2'-O-methyl modified nucleotide
  modified_base 68: mod_base = OTHER; note = 2'-O-methyl modified nucleotide
  modified_base 69: mod_base = OTHER; note = 2'-O-methyl modified nucleotide
  modified_base 70: mod_base = OTHER; note = 2'-O-methyl modified nucleotide
  modified_base 75: mod_base = OTHER; note = 2'-O-methyl modified nucleotide
  modified_base 77: mod_base = OTHER; note = 2'-O-methyl modified nucleotide
  modified_base 80: mod_base = OTHER; note = 2'-O-methyl modified nucleotide
  modified_base 86: mod_base = OTHER; note = 2'-O-methyl modified nucleotide
  modified_base 87: mod_base = OTHER; note = 2'-O-methyl modified nucleotide
  modified_base 89: mod_base = OTHER; note = 2'-O-methyl modified nucleotide
  modified_base 90: mod_base = OTHER; note = 2'-O-methyl modified nucleotide
  modified_base 91: mod_base = OTHER; note = 2'-O-methyl modified nucleotide
  modified_base 92: mod_base = OTHER; note = 2'-O-methyl modified nucleotide
  modified_base 99: mod_base = OTHER; note = nucleotide with phosphorothioate linkage
  modified_base 100: mod_base = OTHER; note = 2'-O-methyl modified nucleotide with phosphorothioate linkage
  modified_base 101: mod_base = OTHER; note = 2'-O-methyl modified nucleotide

SEQ ID NO: 2564 - RNA, 101 nt, synthetic construct; identical to SEQ ID NO: 1564
  source 1..101: mol_type = other RNA
  modified_base 1: mod_base = OTHER; note = 2'-O-methyl modified nucleotide with phosphorothioate linkage
  modified_base 2: mod_base = OTHER; note = 2'-O-methyl modified nucleotide with phosphorothioate linkage
  modified_base 3: mod_base = OTHER; note = 2'-O-methyl modified nucleotide with phosphorothioate linkage
  modified_base 4: mod_base = OTHER; note = 2'-O-methyl modified nucleotide
  modified_base 5: mod_base = OTHER; note = 2'-O-methyl modified nucleotide
  modified_base 8: mod_base = OTHER; note = 2'-O-methyl modified nucleotide
  modified_base 9: mod_base = OTHER; note = 2'-O-methyl modified nucleotide
  modified_base 11: mod_base = OTHER; note = 2'-O-methyl modified nucleotide
  modified_base 13: mod_base = OTHER; note = 2'-O-methyl modified nucleotide
  modified_base 18: mod_base = OTHER; note = 2'-O-methyl modified nucleotide
  modified_base 22: mod_base = OTHER; note = 2'-O-methyl modified nucleotide
  modified_base 25: mod_base = OTHER; note = 2'-O-methyl modified nucleotide
  modified_base 29: mod_base = OTHER; note = 2'-O-methyl modified nucleotide
  modified_base 30: mod_base = OTHER; note = 2'-O-methyl modified nucleotide
  modified_base 31: mod_base = OTHER; note = 2'-O-methyl modified nucleotide
  modified_base 32: mod_base = OTHER; note = 2'-O-methyl modified nucleotide
  modified_base 37: mod_base = OTHER; note = 2'-O-methyl modified nucleotide
  modified_base 38: mod_base = OTHER; note = 2'-O-methyl modified nucleotide
  modified_base 39: mod_base = OTHER; note = 2'-O-methyl modified nucleotide
  modified_base 40: mod_base = OTHER; note = 2'-O-methyl modified nucleotide
  modified_base 41: mod_base = OTHER; note = 2'-O-methyl modified nucleotide
  modified_base 42: mod_base = OTHER; note = 2'-O-methyl modified nucleotide
  modified_base 43: mod_base = OTHER; note = 2'-O-methyl modified nucleotide
  modified_base 47: mod_base = OTHER; note = 2'-O-methyl modified nucleotide
  modified_base 48: mod_base = OTHER; note = 2'-O-methyl modified nucleotide
  modified_base 51: mod_base = OTHER; note = 2'-O-methyl modified nucleotide
  modified_base 54: mod_base = OTHER; note = nucleotide with phosphorothioate linkage
  modified_base 58: mod_base = OTHER; note = 2'-O-methyl modified nucleotide
  modified_base 59: mod_base = OTHER; note = 2'-O-methyl modified nucleotide
  modified_base 61: mod_base = OTHER; note = 2'-O-methyl modified nucleotide
  modified_base 62: mod_base = OTHER; note = 2'-O-methyl modified nucleotide
  modified_base 63: mod_base = OTHER; note = 2'-O-methyl modified nucleotide
  modified_base 64: mod_base = OTHER; note = 2'-O-methyl modified nucleotide
  modified_base 65: mod_base = OTHER; note = 2'-O-methyl modified nucleotide
  modified_base 66: mod_base = OTHER; note = 2'-O-methyl modified nucleotide
  modified_base 67: mod_base = OTHER; note = 2'-O-methyl modified nucleotide
  modified_base 68: mod_base = OTHER; note = 2'-O-methyl modified nucleotide
  modified_base 69: mod_base = OTHER; note = 2'-O-methyl modified nucleotide
  modified_base 70: mod_base = OTHER; note = 2'-O-methyl modified nucleotide
  modified_base 75: mod_base = OTHER; note = 2'-O-methyl modified nucleotide
  modified_base 77: mod_base = OTHER; note = 2'-O-methyl modified nucleotide
  modified_base 80: mod_base = OTHER; note = 2'-O-methyl modified nucleotide
  modified_base 86: mod_base = OTHER; note = 2'-O-methyl modified nucleotide
  modified_base 87: mod_base = OTHER; note = 2'-O-methyl modified nucleotide
  modified_base 89: mod_base = OTHER; note = 2'-O-methyl modified nucleotide
  modified_base 90: mod_base = OTHER; note = 2'-O-methyl modified nucleotide
  modified_base 91: mod_base = OTHER; note = 2'-O-methyl modified nucleotide
  modified_base 92: mod_base = OTHER; note = 2'-O-methyl modified nucleotide
  modified_base 99: mod_base = OTHER; note = nucleotide with phosphorothioate linkage
  modified_base 100: mod_base = OTHER; note = 2'-O-methyl modified nucleotide with phosphorothioate linkage
  modified_base 101: mod_base = OTHER; note = 2'-O-methyl modified nucleotide

SEQ ID NO: 2565 - RNA, 101 nt, synthetic construct; identical to SEQ ID NO: 1565
  source 1..101: mol_type = other RNA
  modified_base 1: mod_base = OTHER; note = 2'-O-methyl modified nucleotide with phosphorothioate linkage
  modified_base 2: mod_base = OTHER; note = 2'-O-methyl modified nucleotide with phosphorothioate linkage
  modified_base 3: mod_base = OTHER; note = 2'-O-methyl modified nucleotide with phosphorothioate linkage
  modified_base 4: mod_base = OTHER; note = 2'-O-methyl modified nucleotide
  modified_base 5: mod_base = OTHER; note = 2'-O-methyl modified nucleotide
  modified_base 8: mod_base = OTHER; note = 2'-O-methyl modified nucleotide
  modified_base 9: mod_base = OTHER; note = 2'-O-methyl modified nucleotide
  modified_base 11: mod_base = OTHER; note = 2'-O-methyl modified nucleotide
  modified_base 13: mod_base = OTHER; note = 2'-O-methyl modified nucleotide
  modified_base 18: mod_base = OTHER; note = 2'-O-methyl modified nucleotide
  modified_base 22: mod_base = OTHER; note = 2'-O-methyl modified nucleotide
  modified_base 25: mod_base = OTHER; note = 2'-O-methyl modified nucleotide
  modified_base 29: mod_base = OTHER; note = 2'-O-methyl modified nucleotide
  modified_base 30: mod_base = OTHER; note = 2'-O-methyl modified nucleotide
  modified_base 31: mod_base = OTHER; note = 2'-O-methyl modified nucleotide
  modified_base 32: mod_base = OTHER; note = 2'-O-methyl modified nucleotide
  modified_base 37: mod_base = OTHER; note = 2'-O-methyl modified nucleotide
  modified_base 38: mod_base = OTHER; note = 2'-O-methyl modified nucleotide
  modified_base 39: mod_base = OTHER; note = 2'-O-methyl modified nucleotide
  modified_base 40: mod_base = OTHER; note = 2'-O-methyl modified nucleotide
  modified_base 41: mod_base = OTHER; note = 2'-O-methyl modified nucleotide
  modified_base 42: mod_base = OTHER; note = 2'-O-methyl modified nucleotide
  modified_base 43: mod_base = OTHER; note = 2'-O-methyl modified nucleotide
  modified_base 47: mod_base = OTHER; note = 2'-O-methyl modified nucleotide
  modified_base 48: mod_base = OTHER; note = 2'-O-methyl modified nucleotide
  modified_base 51: mod_base = OTHER; note = 2'-O-methyl modified nucleotide
  modified_base 54: mod_base = OTHER; note = nucleotide with phosphorothioate linkage
  modified_base 58: mod_base = OTHER; note = 2'-O-methyl modified nucleotide
  modified_base 59: mod_base = OTHER; note = 2'-O-methyl modified nucleotide
  modified_base 61: mod_base = OTHER; note = 2'-O-methyl modified nucleotide
  modified_base 62: mod_base = OTHER; note = 2'-O-methyl modified nucleotide
  modified_base 63: mod_base = OTHER; note = 2'-O-methyl modified nucleotide
  modified_base 64: mod_base = OTHER; note = 2'-O-methyl modified nucleotide
  modified_base 65: mod_base = OTHER; note = 2'-O-methyl modified nucleotide
  modified_base 66: mod_base = OTHER; note = 2'-O-methyl modified nucleotide
  modified_base 67: mod_base = OTHER; note = 2'-O-methyl modified nucleotide
  modified_base 68: mod_base = OTHER; note = 2'-O-methyl modified nucleotide
  modified_base 69: mod_base = OTHER; note = 2'-O-methyl modified nucleotide
  modified_base 70: mod_base = OTHER; note = 2'-O-methyl modified nucleotide
  modified_base 75: mod_base = OTHER; note = 2'-O-methyl modified nucleotide
  modified_base 77: mod_base = OTHER; note = 2'-O-methyl modified nucleotide
  modified_base 80: mod_base = OTHER; note = 2'-O-methyl modified nucleotide
  modified_base 86: mod_base = OTHER; note = 2'-O-methyl modified nucleotide
  modified_base 87: mod_base = OTHER; note = 2'-O-methyl modified nucleotide
  modified_base 89: mod_base = OTHER; note = 2'-O-methyl modified nucleotide
  modified_base 90: mod_base = OTHER; note = 2'-O-methyl modified nucleotide
  modified_base 91: mod_base = OTHER; note = 2'-O-methyl modified nucleotide
  modified_base 92: mod_base = OTHER; note = 2'-O-methyl modified nucleotide
  modified_base 99: mod_base = OTHER; note = nucleotide with phosphorothioate linkage
  modified_base 100: mod_base = OTHER; note = 2'-O-methyl modified nucleotide with phosphorothioate linkage
  modified_base 101: mod_base = OTHER; note = 2'-O-methyl modified nucleotide

SEQ ID NO: 2566 - RNA, 101 nt, synthetic construct; identical to SEQ ID NO: 1566
  source 1..101: mol_type = other RNA
  modified_base 1: mod_base = OTHER; note = 2'-O-methyl modified nucleotide with phosphorothioate linkage
  modified_base 2: mod_base = OTHER; note = 2'-O-methyl modified nucleotide with phosphorothioate linkage
  modified_base 3: mod_base = OTHER; note = 2'-O-methyl modified nucleotide with phosphorothioate linkage
  modified_base 4: mod_base = OTHER; note = 2'-O-methyl modified nucleotide
  modified_base 5: mod_base = OTHER; note = 2'-O-methyl modified nucleotide
  modified_base 8: mod_base = OTHER; note = 2'-O-methyl modified nucleotide
  modified_base 9: mod_base = OTHER; note = 2'-O-methyl modified nucleotide
  modified_base 11: mod_base = OTHER; note = 2'-O-methyl modified nucleotide
  modified_base 13: mod_base = OTHER; note = 2'-O-methyl modified nucleotide
  modified_base 18: mod_base = OTHER; note = 2'-O-methyl modified nucleotide
  modified_base 22: mod_base = OTHER; note = 2'-O-methyl modified nucleotide
  modified_base 25: mod_base = OTHER; note = 2'-O-methyl modified nucleotide
  modified_base 29: mod_base = OTHER; note = 2'-O-methyl modified nucleotide
  modified_base 30: mod_base = OTHER; note = 2'-O-methyl modified nucleotide
  modified_base 31: mod_base = OTHER; note = 2'-O-methyl modified nucleotide
  modified_base 32: mod_base = OTHER; note = 2'-O-methyl modified nucleotide
  modified_base 37: mod_base = OTHER; note = 2'-O-methyl modified nucleotide
  modified_base 38: mod_base = OTHER; note = 2'-O-methyl modified nucleotide
  modified_base 39: mod_base = OTHER; note = 2'-O-methyl modified nucleotide
  modified_base 40: mod_base = OTHER; note = 2'-O-methyl modified nucleotide
  modified_base 41: mod_base = OTHER; note = 2'-O-methyl modified nucleotide
  modified_base 42: mod_base = OTHER; note = 2'-O-methyl modified nucleotide
  modified_base 43: mod_base = OTHER; note = 2'-O-methyl modified nucleotide
  modified_base 47: mod_base = OTHER; note = 2'-O-methyl modified nucleotide
  modified_base 48: mod_base = OTHER; note = 2'-O-methyl modified nucleotide
  modified_base 51: mod_base = OTHER; note = 2'-O-methyl modified nucleotide
  modified_base 54: mod_base = OTHER; note = nucleotide with phosphorothioate linkage
  modified_base 58: mod_base = OTHER; note = 2'-O-methyl modified nucleotide
  modified_base 59: mod_base = OTHER; note = 2'-O-methyl modified nucleotide
  modified_base 61: mod_base = OTHER; note = 2'-O-methyl modified nucleotide
  modified_base 62: mod_base = OTHER; note = 2'-O-methyl modified nucleotide
  modified_base 63: mod_base = OTHER; note = 2'-O-methyl modified nucleotide
  modified_base 64: mod_base = OTHER; note = 2'-O-methyl modified nucleotide
  modified_base 65: mod_base = OTHER; note = 2'-O-methyl modified nucleotide
  modified_base 66: mod_base = OTHER; note = 2'-O-methyl modified nucleotide
  modified_base 67: mod_base = OTHER; note = 2'-O-methyl modified nucleotide
  modified_base 68: mod_base = OTHER; note = 2'-O-methyl modified nucleotide
  modified_base 69: mod_base = OTHER; note = 2'-O-methyl modified nucleotide
  modified_base 70: mod_base = OTHER; note = 2'-O-methyl modified nucleotide
  modified_base 75: mod_base = OTHER; note = 2'-O-methyl modified nucleotide
  modified_base 77: mod_base = OTHER; note = 2'-O-methyl modified nucleotide
  modified_base 80: mod_base = OTHER; note = 2'-O-methyl modified nucleotide
  modified_base 86: mod_base = OTHER; note = 2'-O-methyl modified nucleotide
  modified_base 87: mod_base = OTHER; note = 2'-O-methyl modified nucleotide
  modified_base 89: mod_base = OTHER; note = 2'-O-methyl modified nucleotide
  modified_base 90: mod_base = OTHER; note = 2'-O-methyl modified nucleotide
  modified_base 91: mod_base = OTHER; note = 2'-O-methyl modified nucleotide
  modified_base 92: mod_base = OTHER; note = 2'-O-methyl modified nucleotide
  modified_base 99: mod_base = OTHER; note = nucleotide with phosphorothioate linkage
  modified_base 100: mod_base = OTHER; note = 2'-O-methyl modified nucleotide with phosphorothioate linkage
  modified_base 101: mod_base = OTHER; note = 2'-O-methyl modified nucleotide

SEQ ID NO: 2567 - RNA, 101 nt, synthetic construct; identical to SEQ ID NO: 1567
  source 1..101: mol_type = other RNA
  modified_base 1: mod_base = OTHER; note = 2'-O-methyl modified nucleotide with phosphorothioate linkage
  modified_base 2: mod_base = OTHER; note = 2'-O-methyl modified nucleotide with phosphorothioate linkage
  modified_base 3: mod_base = OTHER; note = 2'-O-methyl modified nucleotide with phosphorothioate linkage
  modified_base 4: mod_base = OTHER; note = 2'-O-methyl modified nucleotide
  modified_base 5: mod_base = OTHER; note = 2'-O-methyl modified nucleotide
  modified_base 8: mod_base = OTHER; note = 2'-O-methyl modified nucleotide
  modified_base 9: mod_base = OTHER; note = 2'-O-methyl modified nucleotide
  modified_base 11: mod_base = OTHER; note = 2'-O-methyl modified nucleotide
  modified_base 13: mod_base = OTHER; note = 2'-O-methyl modified nucleotide
  modified_base 18: mod_base = OTHER; note = 2'-O-methyl modified nucleotide
  modified_base 22: mod_base = OTHER; note = 2'-O-methyl modified nucleotide
  modified_base 25: mod_base = OTHER; note = 2'-O-methyl modified nucleotide
  modified_base 29: mod_base = OTHER; note = 2'-O-methyl modified nucleotide
  modified_base 30: mod_base = OTHER; note = 2'-O-methyl modified nucleotide
  modified_base 31: mod_base = OTHER; note = 2'-O-methyl modified nucleotide
  modified_base 32: mod_base = OTHER; note = 2'-O-methyl modified nucleotide
  modified_base 37: mod_base = OTHER; note = 2'-O-methyl modified nucleotide
  modified_base 38: mod_base = OTHER; note = 2'-O-methyl modified nucleotide
  modified_base 39: mod_base = OTHER; note = 2'-O-methyl modified nucleotide
  modified_base 40: mod_base = OTHER; note = 2'-O-methyl modified nucleotide
  modified_base 41: mod_base = OTHER; note = 2'-O-methyl modified nucleotide
  modified_base 42: mod_base = OTHER; note = 2'-O-methyl modified nucleotide
  modified_base 43: mod_base = OTHER; note = 2'-O-methyl modified nucleotide
  modified_base 47: mod_base = OTHER; note = 2'-O-methyl modified nucleotide
  modified_base 48: mod_base = OTHER; note = 2'-O-methyl modified nucleotide
  modified_base 51: mod_base = OTHER; note = 2'-O-methyl modified nucleotide
  modified_base 54: mod_base = OTHER; note = nucleotide with phosphorothioate linkage
  modified_base 58: mod_base = OTHER; note = 2'-O-methyl modified nucleotide
  modified_base 59: mod_base = OTHER; note = 2'-O-methyl modified nucleotide
  modified_base 61: mod_base = OTHER; note = 2'-O-methyl modified nucleotide
  modified_base 62: mod_base = OTHER; note = 2'-O-methyl modified nucleotide
  modified_base 63: mod_base = OTHER; note = 2'-O-methyl modified nucleotide
  modified_base 64: mod_base = OTHER; note = 2'-O-methyl modified nucleotide
  modified_base 65: mod_base = OTHER; note = 2'-O-methyl modified nucleotide
  modified_base 66: mod_base = OTHER; note = 2'-O-methyl modified nucleotide
  modified_base 67: mod_base = OTHER; note = 2'-O-methyl modified nucleotide
  modified_base 68: mod_base = OTHER; note = 2'-O-methyl modified nucleotide
  modified_base 69: mod_base = OTHER; note = 2'-O-methyl modified nucleotide
  modified_base 70: mod_base = OTHER; note = 2'-O-methyl modified nucleotide
  modified_base 75: mod_base = OTHER; note = 2'-O-methyl modified nucleotide
  modified_base 77: mod_base = OTHER; note = 2'-O-methyl modified nucleotide
  modified_base 80: mod_base = OTHER; note = 2'-O-methyl modified nucleotide
  modified_base 86: mod_base = OTHER; note = 2'-O-methyl modified nucleotide
  modified_base 87: mod_base = OTHER; note = 2'-O-methyl modified nucleotide
  modified_base 89: mod_base = OTHER; note = 2'-O-methyl modified nucleotide
  modified_base 90: mod_base = OTHER; note = 2'-O-methyl modified nucleotide
  modified_base 91: mod_base = OTHER; note = 2'-O-methyl modified nucleotide
  modified_base 92: mod_base = OTHER; note = 2'-O-methyl modified nucleotide
  modified_base 99: mod_base = OTHER; note = nucleotide with phosphorothioate linkage
  modified_base 100: mod_base = OTHER; note = 2'-O-methyl modified nucleotide with phosphorothioate linkage
  modified_base 101: mod_base = OTHER; note = 2'-O-methyl modified nucleotide

SEQ ID NO: 2568 - RNA, 101 nt, synthetic construct; identical to SEQ ID NO: 1568
  source 1..101: mol_type = other RNA
  modified_base 1: mod_base = OTHER; note = 2'-O-methyl modified nucleotide with phosphorothioate linkage
  modified_base 2: mod_base = OTHER; note = 2'-O-methyl modified nucleotide with phosphorothioate linkage
  modified_base 3: mod_base = OTHER; note = 2'-O-methyl modified nucleotide with phosphorothioate linkage
  modified_base 4: mod_base = OTHER; note = 2'-O-methyl modified nucleotide
  modified_base 5: mod_base = OTHER; note = 2'-O-methyl modified nucleotide
  modified_base 8: mod_base = OTHER; note = 2'-O-methyl modified nucleotide
  modified_base 9: mod_base = OTHER; note = 2'-O-methyl modified nucleotide
  modified_base 11: mod_base = OTHER; note = 2'-O-methyl modified nucleotide
  modified_base 13: mod_base = OTHER; note = 2'-O-methyl modified nucleotide
  modified_base 18: mod_base = OTHER; note = 2'-O-methyl modified nucleotide
  modified_base 22: mod_base = OTHER; note = 2'-O-methyl modified nucleotide
  modified_base 25: mod_base = OTHER; note = 2'-O-methyl modified nucleotide
  modified_base 29: mod_base = OTHER; note = 2'-O-methyl modified nucleotide
  modified_base 30: mod_base = OTHER; note = 2'-O-methyl modified nucleotide
  modified_base 31: mod_base = OTHER; note = 2'-O-methyl modified nucleotide
  modified_base 32: mod_base = OTHER; note = 2'-O-methyl modified nucleotide
  modified_base 37: mod_base = OTHER; note = 2'-O-methyl modified nucleotide
  modified_base 38: mod_base = OTHER; note = 2'-O-methyl modified nucleotide
  modified_base 39: mod_base = OTHER; note = 2'-O-methyl modified nucleotide
  modified_base 40: mod_base = OTHER; note = 2'-O-methyl modified nucleotide
  modified_base 41: mod_base = OTHER; note = 2'-O-methyl modified nucleotide
  modified_base 42: mod_base = OTHER; note = 2'-O-methyl modified nucleotide
  modified_base 43: mod_base = OTHER; note = 2'-O-methyl modified nucleotide
  modified_base 47: mod_base = OTHER; note = 2'-O-methyl modified nucleotide
  modified_base 48: mod_base = OTHER; note = 2'-O-methyl modified nucleotide
  modified_base 51: mod_base = OTHER; note = 2'-O-methyl modified nucleotide
  modified_base 54: mod_base = OTHER; note = nucleotide with phosphorothioate linkage
  modified_base 58: mod_base = OTHER; note = 2'-O-methyl modified nucleotide
  modified_base 59: mod_base = OTHER; note = 2'-O-methyl modified nucleotide
  modified_base 61: mod_base = OTHER; note = 2'-O-methyl modified nucleotide
  modified_base 62: mod_base = OTHER; note = 2'-O-methyl modified nucleotide
  modified_base 63: mod_base = OTHER; note = 2'-O-methyl modified nucleotide
  modified_base 64: mod_base = OTHER; note = 2'-O-methyl modified nucleotide
  modified_base 65: mod_base = OTHER; note = 2'-O-methyl modified nucleotide
  modified_base 66: mod_base = OTHER; note = 2'-O-methyl modified nucleotide
  modified_base 67: mod_base = OTHER; note = 2'-O-methyl modified nucleotide
  modified_base 68: mod_base = OTHER; note = 2'-O-methyl modified nucleotide
  modified_base 69: mod_base = OTHER; note = 2'-O-methyl modified nucleotide
  modified_base 70: mod_base = OTHER; note = 2'-O-methyl modified nucleotide
  modified_base 75: mod_base = OTHER; note = 2'-O-methyl modified nucleotide
  modified_base 77: mod_base = OTHER; note = 2'-O-methyl modified nucleotide
  modified_base 80: mod_base = OTHER; note = 2'-O-methyl modified nucleotide
  modified_base 86: mod_base = OTHER; note = 2'-O-methyl modified nucleotide
  modified_base 87: mod_base = OTHER; note = 2'-O-methyl modified nucleotide
  modified_base 89: mod_base = OTHER; note = 2'-O-methyl modified nucleotide
  modified_base 90: mod_base = OTHER; note = 2'-O-methyl modified nucleotide
  modified_base 91: mod_base = OTHER; note = 2'-O-methyl modified nucleotide
  modified_base 92: mod_base = OTHER; note = 2'-O-methyl modified nucleotide
  modified_base 99: mod_base = OTHER; note = nucleotide with phosphorothioate linkage
  modified_base 100: mod_base = OTHER; note = 2'-O-methyl modified nucleotide with phosphorothioate linkage
  modified_base 101: mod_base = OTHER; note = 2'-O-methyl modified nucleotide

SEQ ID NO: 2569 - RNA, 101 nt, synthetic construct; identical to SEQ ID NO: 1569
  source 1..101: mol_type = other RNA
  modified_base 1: mod_base = OTHER; note = 2'-O-methyl modified nucleotide with phosphorothioate linkage
  modified_base 2: mod_base = OTHER; note = 2'-O-methyl modified nucleotide with phosphorothioate linkage
  modified_base 3: mod_base = OTHER; note = 2'-O-methyl modified nucleotide with phosphorothioate linkage
  modified_base 4: mod_base = OTHER; note = 2'-O-methyl modified nucleotide
  modified_base 5: mod_base = OTHER; note = 2'-O-methyl modified nucleotide
  modified_base 8: mod_base = OTHER; note = 2'-O-methyl modified nucleotide
  modified_base 9: mod_base = OTHER; note = 2'-O-methyl modified nucleotide
  modified_base 11: mod_base = OTHER; note = 2'-O-methyl modified nucleotide
  modified_base 13: mod_base = OTHER; note = 2'-O-methyl modified nucleotide
  modified_base 18: mod_base = OTHER; note = 2'-O-methyl modified nucleotide
  modified_base 22: mod_base = OTHER; note = 2'-O-methyl modified nucleotide
  modified_base 25: mod_base = OTHER; note = 2'-O-methyl modified nucleotide
  modified_base 29: mod_base = OTHER; note = 2'-O-methyl modified nucleotide
  modified_base 30: mod_base = OTHER; note = 2'-O-methyl modified nucleotide
  modified_base 31: mod_base = OTHER; note = 2'-O-methyl modified nucleotide
  modified_base 32: mod_base = OTHER; note = 2'-O-methyl modified nucleotide
  modified_base 37: mod_base = OTHER; note = 2'-O-methyl modified nucleotide
  modified_base 38: mod_base = OTHER; note = 2'-O-methyl modified nucleotide
  modified_base 39: mod_base = OTHER; note = 2'-O-methyl modified nucleotide
  modified_base 40: mod_base = OTHER; note = 2'-O-methyl modified nucleotide
  modified_base 41: mod_base = OTHER; note = 2'-O-methyl modified nucleotide
  modified_base 42: mod_base = OTHER; note = 2'-O-methyl modified nucleotide
  modified_base 43: mod_base = OTHER; note = 2'-O-methyl modified nucleotide
  modified_base 47: mod_base = OTHER; note = 2'-O-methyl modified nucleotide
  modified_base 48: mod_base = OTHER; note = 2'-O-methyl modified nucleotide
  modified_base 51: mod_base = OTHER; note = 2'-O-methyl modified nucleotide
  modified_base 54: mod_base = OTHER; note = nucleotide with phosphorothioate linkage
  modified_base 58: mod_base = OTHER; note = 2'-O-methyl modified nucleotide
  modified_base 59: mod_base = OTHER; note = 2'-O-methyl modified nucleotide
  modified_base 61: mod_base = OTHER; note = 2'-O-methyl modified nucleotide
  modified_base 62: mod_base = OTHER; note = 2'-O-methyl modified nucleotide
  modified_base 63: mod_base = OTHER; note = 2'-O-methyl modified nucleotide
  modified_base 64: mod_base = OTHER; note = 2'-O-methyl modified nucleotide
  modified_base 65: mod_base = OTHER; note = 2'-O-methyl modified nucleotide
  modified_base 66: mod_base = OTHER; note = 2'-O-methyl modified nucleotide
  modified_base 67: mod_base = OTHER; note = 2'-O-methyl modified nucleotide
  modified_base 68: mod_base = OTHER; note = 2'-O-methyl modified nucleotide
  modified_base 69: mod_base = OTHER; note = 2'-O-methyl modified nucleotide
  modified_base 70: mod_base = OTHER; note = 2'-O-methyl modified nucleotide
  modified_base 75: mod_base = OTHER; note = 2'-O-methyl modified nucleotide
  modified_base 77: mod_base = OTHER; note = 2'-O-methyl modified nucleotide
  modified_base 80: mod_base = OTHER; note = 2'-O-methyl modified nucleotide
  modified_base 86: mod_base = OTHER; note = 2'-O-methyl modified nucleotide
  modified_base 87: mod_base = OTHER; note = 2'-O-methyl modified nucleotide
  modified_base 89: mod_base = OTHER; note = 2'-O-methyl modified nucleotide
  modified_base 90: mod_base = OTHER; note = 2'-O-methyl modified nucleotide
  modified_base 91: mod_base = OTHER; note = 2'-O-methyl modified nucleotide
  modified_base 92: mod_base = OTHER; note = 2'-O-methyl modified nucleotide
  modified_base 99: mod_base = OTHER; note = nucleotide with phosphorothioate linkage
  modified_base 100: mod_base = OTHER; note = 2'-O-methyl modified nucleotide with phosphorothioate linkage
  modified_base 101: mod_base = OTHER; note = 2'-O-methyl modified nucleotide

SEQ ID NO: 2570 - RNA, 101 nt, synthetic construct; identical to SEQ ID NO: 1570
  source 1..101: mol_type = other RNA
  modified_base 1: mod_base = OTHER; note = 2'-O-methyl modified nucleotide with phosphorothioate linkage
  modified_base 2: mod_base = OTHER; note = 2'-O-methyl modified nucleotide with phosphorothioate linkage
  modified_base 3: mod_base = OTHER; note = 2'-O-methyl modified nucleotide with phosphorothioate linkage
  modified_base 4: mod_base = OTHER; note = 2'-O-methyl modified nucleotide
  modified_base 5: mod_base = OTHER; note = 2'-O-methyl modified nucleotide
  modified_base 8: mod_base = OTHER; note = 2'-O-methyl modified nucleotide
  modified_base 9: mod_base = OTHER; note = 2'-O-methyl modified nucleotide
  modified_base 11: mod_base = OTHER; note = 2'-O-methyl modified nucleotide
  modified_base 13: mod_base = OTHER; note = 2'-O-methyl modified nucleotide
  modified_base 18: mod_base = OTHER; note = 2'-O-methyl modified nucleotide
  modified_base 22: mod_base = OTHER; note = 2'-O-methyl modified nucleotide
  modified_base 25: mod_base = OTHER; note = 2'-O-methyl modified nucleotide
  modified_base 29: mod_base = OTHER; note = 2'-O-methyl modified nucleotide
  modified_base 30: mod_base = OTHER; note = 2'-O-methyl modified nucleotide
  modified_base 31: mod_base = OTHER; note = 2'-O-methyl modified nucleotide
  modified_base 32: mod_base = OTHER; note = 2'-O-methyl modified nucleotide
  modified_base 37: mod_base = OTHER; note = 2'-O-methyl modified nucleotide
  modified_base 38: mod_base = OTHER; note = 2'-O-methyl modified nucleotide
  modified_base 39: mod_base = OTHER; note = 2'-O-methyl modified nucleotide
  modified_base 40: mod_base = OTHER; note = 2'-O-methyl modified nucleotide
  modified_base 41: mod_base = OTHER; note = 2'-O-methyl modified nucleotide
  modified_base 42: mod_base = OTHER; note = 2'-O-methyl modified nucleotide
  modified_base 43: mod_base = OTHER; note = 2'-O-methyl modified nucleotide
  modified_base 47: mod_base = OTHER; note = 2'-O-methyl modified nucleotide
  modified_base 48: mod_base = OTHER; note = 2'-O-methyl modified nucleotide
  modified_base 51: mod_base = OTHER; note = 2'-O-methyl modified nucleotide
  modified_base 54: mod_base = OTHER; note = nucleotide with phosphorothioate linkage
  modified_base 58: mod_base = OTHER; note = 2'-O-methyl modified nucleotide
  modified_base 59: mod_base = OTHER; note = 2'-O-methyl modified nucleotide
  modified_base 61: mod_base = OTHER; note = 2'-O-methyl modified nucleotide
  modified_base 62: mod_base = OTHER; note = 2'-O-methyl modified nucleotide
  modified_base 63: mod_base = OTHER; note = 2'-O-methyl modified nucleotide
  modified_base 64: mod_base = OTHER; note = 2'-O-methyl modified nucleotide
  modified_base 65: mod_base = OTHER; note = 2'-O-methyl modified nucleotide
  modified_base 66: mod_base = OTHER; note = 2'-O-methyl modified nucleotide
  modified_base 67: mod_base = OTHER; note = 2'-O-methyl modified nucleotide
  modified_base 68: mod_base = OTHER; note = 2'-O-methyl modified nucleotide
  modified_base 69: mod_base = OTHER; note = 2'-O-methyl modified nucleotide
  modified_base 70: mod_base = OTHER; note = 2'-O-methyl modified nucleotide
  modified_base 75: mod_base = OTHER; note = 2'-O-methyl modified nucleotide
  modified_base 77: mod_base = OTHER; note = 2'-O-methyl modified nucleotide
  modified_base 80: mod_base = OTHER; note = 2'-O-methyl modified nucleotide
  modified_base 86: mod_base = OTHER; note = 2'-O-methyl modified nucleotide
  modified_base 87: mod_base = OTHER; note = 2'-O-methyl modified nucleotide
  modified_base 89: mod_base = OTHER; note = 2'-O-methyl modified nucleotide
  modified_base 90: mod_base = OTHER; note = 2'-O-methyl modified nucleotide
  modified_base 91: mod_base = OTHER; note = 2'-O-methyl modified nucleotide
  modified_base 92: mod_base = OTHER; note = 2'-O-methyl modified nucleotide
  modified_base 99: mod_base = OTHER; note = nucleotide with phosphorothioate linkage
  modified_base 100: mod_base = OTHER; note = 2'-O-methyl modified nucleotide with phosphorothioate linkage
  modified_base 101: mod_base = OTHER; note = 2'-O-methyl modified nucleotide

SEQ ID NO: 2571 - RNA, 101 nt, synthetic construct; identical to SEQ ID NO: 1571
  source 1..101: mol_type = other RNA
  modified_base 1: mod_base = OTHER; note = 2'-O-methyl modified nucleotide with phosphorothioate linkage
  modified_base 2: mod_base = OTHER; note = 2'-O-methyl modified nucleotide with phosphorothioate linkage
  modified_base 3: mod_base = OTHER; note = 2'-O-methyl modified nucleotide with phosphorothioate linkage
  modified_base 4: mod_base = OTHER; note = 2'-O-methyl modified nucleotide
  modified_base 5: mod_base = OTHER; note = 2'-O-methyl modified nucleotide
  modified_base 8: mod_base = OTHER; note = 2'-O-methyl modified nucleotide
  modified_base 9: mod_base = OTHER; note = 2'-O-methyl modified nucleotide
  modified_base 11: mod_base = OTHER; note = 2'-O-methyl modified nucleotide
  modified_base 13: mod_base = OTHER; note = 2'-O-methyl modified nucleotide
  modified_base 18: mod_base = OTHER; note = 2'-O-methyl modified nucleotide
  modified_base 22: mod_base = OTHER; note = 2'-O-methyl modified nucleotide
  modified_base 25: mod_base = OTHER; note = 2'-O-methyl modified nucleotide
  modified_base 29: mod_base = OTHER; note = 2'-O-methyl modified nucleotide
  modified_base 30: mod_base = OTHER; note = 2'-O-methyl modified nucleotide
  modified_base 31: mod_base = OTHER; note = 2'-O-methyl modified nucleotide
  modified_base 32: mod_base = OTHER; note = 2'-O-methyl modified nucleotide
  modified_base 37: mod_base = OTHER; note = 2'-O-methyl modified nucleotide
  modified_base 38: mod_base = OTHER; note = 2'-O-methyl modified nucleotide
  modified_base 39: mod_base = OTHER; note = 2'-O-methyl modified nucleotide
  modified_base 40: mod_base = OTHER; note = 2'-O-methyl modified nucleotide
  modified_base 41: mod_base = OTHER; note = 2'-O-methyl modified nucleotide
  modified_base 42: mod_base = OTHER; note = 2'-O-methyl modified nucleotide
  modified_base 43: mod_base = OTHER; note = 2'-O-methyl modified nucleotide
  modified_base 47: mod_base = OTHER; note = 2'-O-methyl modified nucleotide
  modified_base 48: mod_base = OTHER; note = 2'-O-methyl modified nucleotide
  modified_base 51: mod_base = OTHER; note = 2'-O-methyl modified nucleotide
  modified_base 54: mod_base = OTHER; note = nucleotide with phosphorothioate linkage
  modified_base 58: mod_base = OTHER; note = 2'-O-methyl modified nucleotide
  modified_base 59: mod_base = OTHER; note = 2'-O-methyl modified nucleotide
  modified_base 61: mod_base = OTHER; note = 2'-O-methyl modified nucleotide
  modified_base 62: mod_base = OTHER; note = 2'-O-methyl modified nucleotide
  modified_base 63: mod_base = OTHER; note = 2'-O-methyl modified nucleotide
  modified_base 64: mod_base = OTHER; note = 2'-O-methyl modified nucleotide
  modified_base 65: mod_base = OTHER; note = 2'-O-methyl modified nucleotide
  modified_base 66: mod_base = OTHER; note = 2'-O-methyl modified nucleotide
  modified_base 67: mod_base = OTHER; note = 2'-O-methyl modified nucleotide
  modified_base 68: mod_base = OTHER; note = 2'-O-methyl modified nucleotide
  modified_base 69: mod_base = OTHER; note = 2'-O-methyl modified nucleotide
  modified_base 70: mod_base = OTHER; note = 2'-O-methyl modified nucleotide
  modified_base 75: mod_base = OTHER; note = 2'-O-methyl modified nucleotide
  modified_base 77: mod_base = OTHER; note = 2'-O-methyl modified nucleotide
  modified_base 80: mod_base = OTHER; note = 2'-O-methyl modified nucleotide
  modified_base 86: mod_base = OTHER; note = 2'-O-methyl modified nucleotide
  modified_base 87: mod_base = OTHER; note = 2'-O-methyl modified nucleotide
  modified_base 89: mod_base = OTHER; note = 2'-O-methyl modified nucleotide
  modified_base 90: mod_base = OTHER; note = 2'-O-methyl modified nucleotide
  modified_base 91: mod_base = OTHER; note = 2'-O-methyl modified nucleotide
  modified_base 92: mod_base = OTHER; note = 2'-O-methyl modified nucleotide
  modified_base 99: mod_base = OTHER; note = nucleotide with phosphorothioate linkage
  modified_base 100: mod_base = OTHER; note = 2'-O-methyl modified nucleotide with phosphorothioate linkage
  modified_base 101: mod_base = OTHER; note = 2'-O-methyl modified nucleotide

SEQ ID NO: 2572 - RNA, 101 nt, synthetic construct; identical to SEQ ID NO: 1572
  source 1..101: mol_type = other RNA
  modified_base 1: mod_base = OTHER; note = 2'-O-methyl modified nucleotide with phosphorothioate linkage
  modified_base 2: mod_base = OTHER; note = 2'-O-methyl modified nucleotide with phosphorothioate linkage
  modified_base 3: mod_base = OTHER; note = 2'-O-methyl modified nucleotide with phosphorothioate linkage
  modified_base 4: mod_base = OTHER; note = 2'-O-methyl modified nucleotide
  modified_base 5: mod_base = OTHER; note = 2'-O-methyl modified nucleotide
  modified_base 8: mod_base = OTHER; note = 2'-O-methyl modified nucleotide
  modified_base 9: mod_base = OTHER; note = 2'-O-methyl modified nucleotide
  modified_base 11: mod_base = OTHER; note = 2'-O-methyl modified nucleotide
  modified_base 13: mod_base = OTHER; note = 2'-O-methyl modified nucleotide
  modified_base 18: mod_base = OTHER; note = 2'-O-methyl modified nucleotide
  modified_base 22: mod_base = OTHER; note = 2'-O-methyl modified nucleotide
  modified_base 25: mod_base = OTHER; note = 2'-O-methyl modified nucleotide
  modified_base 29: mod_base = OTHER; note = 2'-O-methyl modified nucleotide
  modified_base 30: mod_base = OTHER; note = 2'-O-methyl modified nucleotide
  modified_base 31: mod_base = OTHER; note = 2'-O-methyl modified nucleotide
  modified_base 32: mod_base = OTHER; note = 2'-O-methyl modified nucleotide
  modified_base 37: mod_base = OTHER; note = 2'-O-methyl modified nucleotide
  modified_base 38: mod_base = OTHER; note = 2'-O-methyl modified nucleotide
  modified_base 39: mod_base = OTHER; note = 2'-O-methyl modified nucleotide
  modified_base 40: mod_base = OTHER; note = 2'-O-methyl modified nucleotide
  modified_base 41: mod_base = OTHER; note = 2'-O-methyl modified nucleotide
  modified_base 42: mod_base = OTHER; note = 2'-O-methyl modified nucleotide
  modified_base 43: mod_base = OTHER; note = 2'-O-methyl modified nucleotide
  modified_base 47: mod_base = OTHER; note = 2'-O-methyl modified nucleotide
  modified_base 48: mod_base = OTHER; note = 2'-O-methyl modified nucleotide
  modified_base 51: mod_base = OTHER; note = 2'-O-methyl modified nucleotide
  modified_base 54: mod_base = OTHER; note = nucleotide with phosphorothioate linkage
  modified_base 58: mod_base = OTHER; note = 2'-O-methyl modified nucleotide
  modified_base 59: mod_base = OTHER; note = 2'-O-methyl modified nucleotide
  modified_base 61: mod_base = OTHER; note = 2'-O-methyl modified nucleotide
  modified_base 62: mod_base = OTHER; note = 2'-O-methyl modified nucleotide
  modified_base 63: mod_base = OTHER; note = 2'-O-methyl modified nucleotide
  modified_base 64: mod_base = OTHER; note = 2'-O-methyl modified nucleotide
  modified_base 65: mod_base = OTHER; note = 2'-O-methyl modified nucleotide
  modified_base 66: mod_base = OTHER; note = 2'-O-methyl modified nucleotide
  modified_base 67: mod_base = OTHER; note = 2'-O-methyl modified nucleotide
  modified_base 68: mod_base = OTHER; note = 2'-O-methyl modified nucleotide
  modified_base 69: mod_base = OTHER; note = 2'-O-methyl modified nucleotide
  modified_base 70: mod_base = OTHER; note = 2'-O-methyl modified nucleotide
  modified_base 75: mod_base = OTHER; note = 2'-O-methyl modified nucleotide
  modified_base 77: mod_base = OTHER; note = 2'-O-methyl modified nucleotide
  modified_base 80: mod_base = OTHER; note = 2'-O-methyl modified nucleotide
  modified_base 86: mod_base = OTHER; note = 2'-O-methyl modified nucleotide
  modified_base 87: mod_base = OTHER; note = 2'-O-methyl modified nucleotide
  modified_base 89: mod_base = OTHER; note = 2'-O-methyl modified nucleotide
  modified_base 90: mod_base = OTHER; note = 2'-O-methyl modified nucleotide
  modified_base 91: mod_base = OTHER; note = 2'-O-methyl modified nucleotide
  modified_base 92: mod_base = OTHER; note = 2'-O-methyl modified nucleotide
  modified_base 99: mod_base = OTHER; note = nucleotide with phosphorothioate linkage
  modified_base 100: mod_base = OTHER; note = 2'-O-methyl modified nucleotide with phosphorothioate linkage
  modified_base 101: mod_base = OTHER; note = 2'-O-methyl modified nucleotide

SEQ ID NO: 2573 - RNA, 101 nt, synthetic construct; identical to SEQ ID NO: 1573
  source 1..101: mol_type = other RNA
  modified_base 1: mod_base = OTHER; note = 2'-O-methyl modified nucleotide with phosphorothioate linkage
  modified_base 2: mod_base = OTHER; note = 2'-O-methyl modified nucleotide with phosphorothioate linkage
  modified_base 3: mod_base = OTHER; note = 2'-O-methyl modified nucleotide with phosphorothioate linkage
  modified_base 4: mod_base = OTHER; note = 2'-O-methyl modified nucleotide
  modified_base 5: mod_base = OTHER; note = 2'-O-methyl modified nucleotide
  modified_base 8: mod_base = OTHER; note = 2'-O-methyl modified nucleotide
  modified_base 9: mod_base = OTHER; note = 2'-O-methyl modified nucleotide
  modified_base 11: mod_base = OTHER; note = 2'-O-methyl modified nucleotide
  modified_base 13: mod_base = OTHER; note = 2'-O-methyl modified nucleotide
  modified_base 18: mod_base = OTHER; note = 2'-O-methyl modified nucleotide
  modified_base 22: mod_base = OTHER; note = 2'-O-methyl modified nucleotide
  modified_base 25: mod_base = OTHER; note = 2'-O-methyl modified nucleotide
  modified_base 29: mod_base = OTHER; note = 2'-O-methyl modified nucleotide
  modified_base 30: mod_base = OTHER; note = 2'-O-methyl modified nucleotide
  modified_base 31: mod_base = OTHER; note = 2'-O-methyl modified nucleotide
  modified_base 32: mod_base = OTHER; note = 2'-O-methyl modified nucleotide
  modified_base 37: mod_base = OTHER; note = 2'-O-methyl modified nucleotide
  modified_base 38: mod_base = OTHER; note = 2'-O-methyl modified nucleotide
  modified_base 39: mod_base = OTHER; note = 2'-O-methyl modified nucleotide
  modified_base 40: mod_base = OTHER; note = 2'-O-methyl modified nucleotide
  modified_base 41: mod_base = OTHER; note = 2'-O-methyl modified nucleotide
  modified_base 42: mod_base = OTHER; note = 2'-O-methyl modified nucleotide
  modified_base 43: mod_base = OTHER; note = 2'-O-methyl modified nucleotide
  modified_base 47: mod_base = OTHER; note = 2'-O-methyl modified nucleotide
  modified_base 48: mod_base = OTHER; note = 2'-O-methyl modified nucleotide
  modified_base 51: mod_base = OTHER; note = 2'-O-methyl modified nucleotide
  modified_base 54: mod_base = OTHER; note = nucleotide with phosphorothioate linkage
  modified_base 58: mod_base = OTHER; note = 2'-O-methyl modified nucleotide
  modified_base 59: mod_base = OTHER; note = 2'-O-methyl modified nucleotide
  modified_base 61: mod_base = OTHER; note = 2'-O-methyl modified nucleotide
  modified_base 62: mod_base = OTHER; note = 2'-O-methyl modified nucleotide
  modified_base 63: mod_base = OTHER; note = 2'-O-methyl modified nucleotide
  modified_base 64: mod_base = OTHER; note = 2'-O-methyl modified nucleotide
  modified_base 65: mod_base = OTHER; note = 2'-O-methyl modified nucleotide
  modified_base 66: mod_base = OTHER; note = 2'-O-methyl modified nucleotide
  modified_base 67: mod_base = OTHER; note = 2'-O-methyl modified nucleotide
  modified_base 68: mod_base = OTHER; note = 2'-O-methyl modified nucleotide
  modified_base 69: mod_base = OTHER; note = 2'-O-methyl modified nucleotide
  modified_base 70: mod_base = OTHER; note = 2'-O-methyl modified nucleotide
  modified_base 75: mod_base = OTHER; note = 2'-O-methyl modified nucleotide
  modified_base 77: mod_base = OTHER; note = 2'-O-methyl modified nucleotide
  modified_base 80: mod_base = OTHER; note = 2'-O-methyl modified nucleotide
  modified_base 86: mod_base = OTHER; note = 2'-O-methyl modified nucleotide
  modified_base 87: mod_base = OTHER; note = 2'-O-methyl modified nucleotide
  modified_base 89: mod_base = OTHER; note = 2'-O-methyl modified nucleotide
  modified_base 90: mod_base = OTHER; note = 2'-O-methyl modified nucleotide
  modified_base 91: mod_base = OTHER; note = 2'-O-methyl modified nucleotide
  modified_base 92: mod_base = OTHER; note = 2'-O-methyl modified nucleotide
  modified_base 99: mod_base = OTHER; note = nucleotide with phosphorothioate linkage
  modified_base 100: mod_base = OTHER; note = 2'-O-methyl modified nucleotide with phosphorothioate linkage
  modified_base 101: mod_base = OTHER; note = 2'-O-methyl modified nucleotide

SEQ ID NO: 2574 - RNA, 101 nt, synthetic construct; identical to SEQ ID NO: 1574
  source 1..101: mol_type = other RNA
  modified_base 1: mod_base = OTHER; note = 2'-O-methyl modified nucleotide with phosphorothioate linkage
  modified_base 2: mod_base = OTHER; note = 2'-O-methyl modified nucleotide with phosphorothioate linkage
  modified_base 3: mod_base = OTHER; note = 2'-O-methyl modified nucleotide with phosphorothioate linkage
  modified_base 4: mod_base = OTHER; note = 2'-O-methyl modified nucleotide
  modified_base 5: mod_base = OTHER; note = 2'-O-methyl modified nucleotide
  modified_base 8: mod_base = OTHER; note = 2'-O-methyl modified nucleotide
  modified_base 9: mod_base = OTHER; note = 2'-O-methyl modified nucleotide
  modified_base 11: mod_base = OTHER; note = 2'-O-methyl modified nucleotide
  modified_base 13: mod_base = OTHER; note = 2'-O-methyl modified nucleotide
  modified_base 18: mod_base = OTHER; note = 2'-O-methyl modified nucleotide
  modified_base 22: mod_base = OTHER; note = 2'-O-methyl modified nucleotide
  modified_base 25: mod_base = OTHER; note = 2'-O-methyl modified nucleotide
  modified_base 29: mod_base = OTHER; note = 2'-O-methyl modified nucleotide
  modified_base 30: mod_base = OTHER; note = 2'-O-methyl modified nucleotide
  modified_base 31: mod_base = OTHER; note = 2'-O-methyl modified nucleotide
  modified_base 32: mod_base = OTHER; note = 2'-O-methyl modified nucleotide
  modified_base 37: mod_base = OTHER; note = 2'-O-methyl modified nucleotide
  modified_base 38: mod_base = OTHER; note = 2'-O-methyl modified nucleotide
  modified_base 39: mod_base = OTHER; note = 2'-O-methyl modified nucleotide
  modified_base 40: mod_base = OTHER; note = 2'-O-methyl modified nucleotide
  modified_base 41: mod_base = OTHER; note = 2'-O-methyl modified nucleotide
  modified_base 42: mod_base = OTHER; note = 2'-O-methyl modified nucleotide
  modified_base 43: mod_base = OTHER; note = 2'-O-methyl modified nucleotide
  modified_base 47: mod_base = OTHER; note = 2'-O-methyl modified nucleotide
  modified_base 48: mod_base = OTHER; note = 2'-O-methyl modified nucleotide
  modified_base 51: mod_base = OTHER; note = 2'-O-methyl modified nucleotide
  modified_base 54: mod_base = OTHER; note = nucleotide with phosphorothioate linkage
  modified_base 58: mod_base = OTHER; note = 2'-O-methyl modified nucleotide
  modified_base 59: mod_base = OTHER; note = 2'-O-methyl modified nucleotide
  modified_base 61: mod_base = OTHER; note = 2'-O-methyl modified nucleotide
  modified_base 62: mod_base = OTHER; note = 2'-O-methyl modified nucleotide
  modified_base 63: mod_base = OTHER; note = 2'-O-methyl modified nucleotide
  modified_base 64: mod_base = OTHER; note = 2'-O-methyl modified nucleotide
  modified_base 65: mod_base = OTHER; note = 2'-O-methyl modified nucleotide
  modified_base 66: mod_base = OTHER; note = 2'-O-methyl modified nucleotide
  modified_base 67: mod_base = OTHER; note = 2'-O-methyl modified nucleotide
  modified_base 68: mod_base = OTHER; note = 2'-O-methyl modified nucleotide
  modified_base 69: mod_base = OTHER; note = 2'-O-methyl modified nucleotide
  modified_base 70: mod_base = OTHER; note = 2'-O-methyl modified nucleotide
  modified_base 75: mod_base = OTHER; note = 2'-O-methyl modified nucleotide
  modified_base 77: mod_base = OTHER; note = 2'-O-methyl modified nucleotide
  modified_base 80: mod_base = OTHER; note = 2'-O-methyl modified nucleotide
  modified_base 86: mod_base = OTHER; note = 2'-O-methyl modified nucleotide
  modified_base 87: mod_base = OTHER; note = 2'-O-methyl modified nucleotide
  modified_base 89: mod_base = OTHER; note = 2'-O-methyl modified nucleotide
  modified_base 90: mod_base = OTHER; note = 2'-O-methyl modified nucleotide
  modified_base 91: mod_base = OTHER; note = 2'-O-methyl modified nucleotide
  modified_base 92: mod_base = OTHER; note = 2'-O-methyl modified nucleotide
  modified_base 99: mod_base = OTHER; note = nucleotide with phosphorothioate linkage
  modified_base 100: mod_base = OTHER; note = 2'-O-methyl modified nucleotide with phosphorothioate linkage
  modified_base 101: mod_base = OTHER; note = 2'-O-methyl modified nucleotide

SEQ ID NO: 2575 - RNA, 101 nt, synthetic construct; identical to SEQ ID NO: 1575
  source 1..101: mol_type = other RNA
  modified_base 1: mod_base = OTHER; note = 2'-O-methyl modified nucleotide with phosphorothioate linkage
  modified_base 2: mod_base = OTHER; note = 2'-O-methyl modified nucleotide with phosphorothioate linkage
  modified_base 3: mod_base = OTHER; note = 2'-O-methyl modified nucleotide with phosphorothioate linkage
  modified_base 4: mod_base = OTHER; note = 2'-O-methyl modified nucleotide
  modified_base 5: mod_base = OTHER; note = 2'-O-methyl modified nucleotide
  modified_base 8: mod_base = OTHER; note = 2'-O-methyl modified nucleotide
  modified_base 9: mod_base = OTHER; note = 2'-O-methyl modified nucleotide
  modified_base 11: mod_base = OTHER; note = 2'-O-methyl modified nucleotide
  modified_base 13: mod_base = OTHER; note = 2'-O-methyl modified nucleotide
  modified_base 18: mod_base = OTHER; note = 2'-O-methyl modified nucleotide
  modified_base 22: mod_base = OTHER; note = 2'-O-methyl modified nucleotide
  modified_base 25: mod_base = OTHER; note = 2'-O-methyl modified nucleotide
  modified_base 29: mod_base = OTHER; note = 2'-O-methyl modified nucleotide
  modified_base 30: mod_base = OTHER; note = 2'-O-methyl modified nucleotide
  modified_base 31: mod_base = OTHER; note = 2'-O-methyl modified nucleotide
  modified_base 32: mod_base = OTHER; note = 2'-O-methyl modified nucleotide
  modified_base 37: mod_base = OTHER; note = 2'-O-methyl modified nucleotide
  modified_base 38: mod_base = OTHER; note = 2'-O-methyl modified nucleotide
  modified_base 39: mod_base = OTHER; note = 2'-O-methyl modified nucleotide
  modified_base 40: mod_base = OTHER; note = 2'-O-methyl modified nucleotide
  modified_base 41: mod_base = OTHER; note = 2'-O-methyl modified nucleotide
  modified_base 42: mod_base = OTHER; note = 2'-O-methyl modified nucleotide
  modified_base 43: mod_base = OTHER; note = 2'-O-methyl modified nucleotide
  modified_base 47: mod_base = OTHER; note = 2'-O-methyl modified nucleotide
  modified_base 48: mod_base = OTHER; note = 2'-O-methyl modified nucleotide
  modified_base 51: mod_base = OTHER; note = 2'-O-methyl modified nucleotide
  modified_base 54: mod_base = OTHER; note = nucleotide with phosphorothioate linkage
  modified_base 58: mod_base = OTHER; note = 2'-O-methyl modified nucleotide
  modified_base 59: mod_base = OTHER; note = 2'-O-methyl modified nucleotide
  modified_base 61: mod_base = OTHER; note = 2'-O-methyl modified nucleotide
  modified_base 62: mod_base = OTHER; note = 2'-O-methyl modified nucleotide
  modified_base 63: mod_base = OTHER; note = 2'-O-methyl modified nucleotide
  modified_base 64: mod_base = OTHER; note = 2'-O-methyl modified nucleotide
  modified_base 65: mod_base = OTHER; note = 2'-O-methyl modified nucleotide
  modified_base 66: mod_base = OTHER; note = 2'-O-methyl modified nucleotide
  modified_base 67: mod_base = OTHER; note = 2'-O-methyl modified nucleotide
  modified_base 68: mod_base = OTHER; note = 2'-O-methyl modified nucleotide
  modified_base 69: mod_base = OTHER; note = 2'-O-methyl modified nucleotide
  modified_base 70: mod_base = OTHER; note = 2'-O-methyl modified nucleotide
  modified_base 75: mod_base = OTHER; note = 2'-O-methyl modified nucleotide
  modified_base 77: mod_base = OTHER; note = 2'-O-methyl modified nucleotide
  modified_base 80: mod_base = OTHER; note = 2'-O-methyl modified nucleotide
  modified_base 86: mod_base = OTHER; note = 2'-O-methyl modified nucleotide
  modified_base 87: mod_base = OTHER; note = 2'-O-methyl modified nucleotide
  modified_base 89: mod_base = OTHER; note = 2'-O-methyl modified nucleotide
  modified_base 90: mod_base = OTHER; note = 2'-O-methyl modified nucleotide
  modified_base 91: mod_base = OTHER; note = 2'-O-methyl modified nucleotide
  modified_base 92: mod_base = OTHER; note = 2'-O-methyl modified nucleotide
  modified_base 99: mod_base = OTHER; note = nucleotide with phosphorothioate linkage
  modified_base 100: mod_base = OTHER; note = 2'-O-methyl modified nucleotide with phosphorothioate linkage
  modified_base 101: mod_base = OTHER; note = 2'-O-methyl modified nucleotide

SEQ ID NO: 2576 - RNA, 101 nt, synthetic construct; identical to SEQ ID NO: 1576
  source 1..101: mol_type = other RNA
  modified_base 1: mod_base = OTHER; note = 2'-O-methyl modified nucleotide with phosphorothioate linkage
  modified_base 2: mod_base = OTHER; note = 2'-O-methyl modified nucleotide with phosphorothioate linkage
  modified_base 3: mod_base = OTHER; note = 2'-O-methyl modified nucleotide with phosphorothioate linkage
  modified_base 4: mod_base = OTHER; note = 2'-O-methyl modified nucleotide
  modified_base 5: mod_base = OTHER; note = 2'-O-methyl modified nucleotide
  modified_base 8: mod_base = OTHER; note = 2'-O-methyl modified nucleotide
  modified_base 9: mod_base = OTHER; note = 2'-O-methyl modified nucleotide
  modified_base 11: mod_base = OTHER; note = 2'-O-methyl modified nucleotide
  modified_base 13: mod_base = OTHER; note = 2'-O-methyl modified nucleotide
  modified_base 18: mod_base = OTHER; note = 2'-O-methyl modified nucleotide
  modified_base 22: mod_base = OTHER; note = 2'-O-methyl modified nucleotide
  modified_base 25: mod_base = OTHER; note = 2'-O-methyl modified nucleotide
  modified_base 29: mod_base = OTHER; note = 2'-O-methyl modified nucleotide
  modified_base 30: mod_base = OTHER; note = 2'-O-methyl modified nucleotide
  modified_base 31: mod_base = OTHER; note = 2'-O-methyl modified nucleotide
  modified_base 32: mod_base = OTHER; note = 2'-O-methyl modified nucleotide
  modified_base 37: mod_base = OTHER; note = 2'-O-methyl modified nucleotide
  modified_base 38: mod_base = OTHER; note = 2'-O-methyl modified nucleotide
  modified_base 39: mod_base = OTHER; note = 2'-O-methyl modified nucleotide
  modified_base 40: mod_base = OTHER; note = 2'-O-methyl modified nucleotide
  modified_base 41: mod_base = OTHER; note = 2'-O-methyl modified nucleotide
  modified_base 42: mod_base = OTHER; note = 2'-O-methyl modified nucleotide
  modified_base 43: mod_base = OTHER; note = 2'-O-methyl modified nucleotide
  modified_base 47: mod_base = OTHER; note = 2'-O-methyl modified nucleotide
  modified_base 48: mod_base = OTHER; note = 2'-O-methyl modified nucleotide
  modified_base 51: mod_base = OTHER; note = 2'-O-methyl modified nucleotide
  modified_base 54: mod_base = OTHER; note = nucleotide with phosphorothioate linkage
  modified_base 58: mod_base = OTHER; note = 2'-O-methyl modified nucleotide
  modified_base 59: mod_base = OTHER; note = 2'-O-methyl modified nucleotide
  modified_base 61: mod_base = OTHER; note = 2'-O-methyl modified nucleotide
  modified_base 62: mod_base = OTHER; note = 2'-O-methyl modified nucleotide
  modified_base 63: mod_base = OTHER; note = 2'-O-methyl modified nucleotide
  modified_base 64: mod_base = OTHER; note = 2'-O-methyl modified nucleotide
  modified_base 65: mod_base = OTHER; note = 2'-O-methyl modified nucleotide
  modified_base 66: mod_base = OTHER; note = 2'-O-methyl modified nucleotide
  modified_base 67: mod_base = OTHER; note = 2'-O-methyl modified nucleotide
  modified_base 68: mod_base = OTHER; note = 2'-O-methyl modified nucleotide
  modified_base 69: mod_base = OTHER; note = 2'-O-methyl modified nucleotide
  modified_base 70: mod_base = OTHER; note = 2'-O-methyl modified nucleotide
  modified_base 75: mod_base = OTHER; note = 2'-O-methyl modified nucleotide
  modified_base 77: mod_base = OTHER; note = 2'-O-methyl modified nucleotide
  modified_base 80: mod_base = OTHER; note = 2'-O-methyl modified nucleotide
  modified_base 86: mod_base = OTHER; note = 2'-O-methyl modified nucleotide
  modified_base 87: mod_base = OTHER; note = 2'-O-methyl modified nucleotide
  modified_base 89: mod_base = OTHER; note = 2'-O-methyl modified nucleotide
  modified_base 90: mod_base = OTHER; note = 2'-O-methyl modified nucleotide
  modified_base 91: mod_base = OTHER; note = 2'-O-methyl modified nucleotide
  modified_base 92: mod_base = OTHER; note = 2'-O-methyl modified nucleotide
  modified_base 99: mod_base = OTHER; note = nucleotide with phosphorothioate linkage
  modified_base 100: mod_base = OTHER; note = 2'-O-methyl modified nucleotide with phosphorothioate linkage
  modified_base 101: mod_base = OTHER; note = 2'-O-methyl modified nucleotide

SEQ ID NO: 2577 - RNA, 101 nt, synthetic construct; identical to SEQ ID NO: 1185
  source 1..101: mol_type = other RNA
  modified_base 1: mod_base = OTHER; note = 2'-O-methyl modified nucleotide with phosphorothioate linkage
  modified_base 2: mod_base = OTHER; note = 2'-O-methyl modified nucleotide with phosphorothioate linkage
  modified_base 3: mod_base = OTHER; note = 2'-O-methyl modified nucleotide with phosphorothioate linkage
  modified_base 4: mod_base = OTHER; note = 2'-O-methyl modified nucleotide
  modified_base 5: mod_base = OTHER; note = 2'-O-methyl modified nucleotide
  modified_base 8: mod_base = OTHER; note = 2'-O-methyl modified nucleotide
  modified_base 9: mod_base = OTHER; note = 2'-O-methyl modified nucleotide
  modified_base 11: mod_base = OTHER; note = 2'-O-methyl modified nucleotide
  modified_base 13: mod_base = OTHER; note = 2'-O-methyl modified nucleotide
  modified_base 18: mod_base = OTHER; note = 2'-O-methyl modified nucleotide
  modified_base 22: mod_base = OTHER; note = 2'-O-methyl modified nucleotide
  modified_base 25: mod_base = OTHER; note = 2'-O-methyl modified nucleotide
  modified_base 29: mod_base = OTHER; note = 2'-O-methyl modified nucleotide
  modified_base 30: mod_base = OTHER; note = 2'-O-methyl modified nucleotide
  modified_base 31: mod_base = OTHER; note = 2'-O-methyl modified nucleotide
  modified_base 32: mod_base = OTHER; note = 2'-O-methyl modified nucleotide
  modified_base 37: mod_base = OTHER; note = 2'-O-methyl modified nucleotide
  modified_base 38: mod_base = OTHER; note = 2'-O-methyl modified nucleotide
  modified_base 39: mod_base = OTHER; note = 2'-O-methyl modified nucleotide
  modified_base 40: mod_base = OTHER; note = 2'-O-methyl modified nucleotide
  modified_base 41: mod_base = OTHER; note = 2'-O-methyl modified nucleotide
  modified_base 42: mod_base = OTHER; note = 2'-O-methyl modified nucleotide
  modified_base 43: mod_base = OTHER; note = 2'-O-methyl modified nucleotide
  modified_base 47: mod_base = OTHER; note = 2'-O-methyl modified nucleotide
  modified_base 48: mod_base = OTHER; note = 2'-O-methyl modified nucleotide
  modified_base 51: mod_base = OTHER; note = 2'-O-methyl modified nucleotide
  modified_base 54: mod_base = OTHER; note = nucleotide with phosphorothioate linkage
  modified_base 58: mod_base = OTHER; note = 2'-O-methyl modified nucleotide
  modified_base 59: mod_base = OTHER; note = 2'-O-methyl modified nucleotide
  modified_base 61: mod_base = OTHER; note = 2'-O-methyl modified nucleotide
  modified_base 62: mod_base = OTHER; note = 2'-O-methyl modified nucleotide
  modified_base 63: mod_base = OTHER; note = 2'-O-methyl modified nucleotide
  modified_base 64: mod_base = OTHER; note = 2'-O-methyl modified nucleotide
  modified_base 65: mod_base = OTHER; note = 2'-O-methyl modified nucleotide
  modified_base 66: mod_base = OTHER; note = 2'-O-methyl modified nucleotide
  modified_base 67: mod_base = OTHER; note = 2'-O-methyl modified nucleotide
  modified_base 68: mod_base = OTHER; note = 2'-O-methyl modified nucleotide
  modified_base 69: mod_base = OTHER; note = 2'-O-methyl modified nucleotide
  modified_base 70: mod_base = OTHER; note = 2'-O-methyl modified nucleotide
  modified_base 75: mod_base = OTHER; note = 2'-O-methyl modified nucleotide
  modified_base 77: mod_base = OTHER; note = 2'-O-methyl modified nucleotide
  modified_base 80: mod_base = OTHER; note = 2'-O-methyl modified nucleotide
  modified_base 86: mod_base = OTHER; note = 2'-O-methyl modified nucleotide
  modified_base 87: mod_base = OTHER; note = 2'-O-methyl modified nucleotide
  modified_base 89: mod_base = OTHER; note = 2'-O-methyl modified nucleotide
  modified_base 90: mod_base = OTHER; note = 2'-O-methyl modified nucleotide
  modified_base 91: mod_base = OTHER; note = 2'-O-methyl modified nucleotide
  modified_base 92: mod_base = OTHER; note = 2'-O-methyl modified nucleotide
  modified_base 99: mod_base = OTHER; note = nucleotide with phosphorothioate linkage
  modified_base 100: mod_base = OTHER; note = 2'-O-methyl modified nucleotide with phosphorothioate linkage
  modified_base 101: mod_base = OTHER; note = 2'-O-methyl modified nucleotide

SEQ ID NO: 2578 - RNA, 101 nt, synthetic construct; identical to SEQ ID NO: 1578
  source 1..101: mol_type = other RNA
  modified_base 1: mod_base = OTHER; note = 2'-O-methyl modified nucleotide with phosphorothioate linkage
  modified_base 2: mod_base = OTHER; note = 2'-O-methyl modified nucleotide with phosphorothioate linkage
  modified_base 3: mod_base = OTHER; note = 2'-O-methyl modified nucleotide with phosphorothioate linkage
  modified_base 4: mod_base = OTHER; note = 2'-O-methyl modified nucleotide
  modified_base 5: mod_base = OTHER; note = 2'-O-methyl modified nucleotide
  modified_base 8: mod_base = OTHER; note = 2'-O-methyl modified nucleotide
  modified_base 9: mod_base = OTHER; note = 2'-O-methyl modified nucleotide
  modified_base 11: mod_base = OTHER; note = 2'-O-methyl modified nucleotide
  modified_base 13: mod_base = OTHER; note = 2'-O-methyl modified nucleotide
  modified_base 18: mod_base = OTHER; note = 2'-O-methyl modified nucleotide
  modified_base 22: mod_base = OTHER; note = 2'-O-methyl modified nucleotide
  modified_base 25: mod_base = OTHER; note = 2'-O-methyl modified nucleotide
  modified_base 29: mod_base = OTHER; note = 2'-O-methyl modified nucleotide
  modified_base 30: mod_base = OTHER; note = 2'-O-methyl modified nucleotide
  modified_base 31: mod_base = OTHER; note = 2'-O-methyl modified nucleotide
  modified_base 32: mod_base = OTHER; note = 2'-O-methyl modified nucleotide
  modified_base 37: mod_base = OTHER; note = 2'-O-methyl modified nucleotide
  modified_base 38: mod_base = OTHER; note = 2'-O-methyl modified nucleotide
  modified_base 39: mod_base = OTHER; note = 2'-O-methyl modified nucleotide
  modified_base 40: mod_base = OTHER; note = 2'-O-methyl modified nucleotide
  modified_base 41: mod_base = OTHER; note = 2'-O-methyl modified nucleotide
  modified_base 42: mod_base = OTHER; note = 2'-O-methyl modified nucleotide
  modified_base 43: mod_base = OTHER; note = 2'-O-methyl modified nucleotide
  modified_base 47: mod_base = OTHER; note = 2'-O-methyl modified nucleotide
  modified_base 48: mod_base = OTHER; note = 2'-O-methyl modified nucleotide
  modified_base 51: mod_base = OTHER; note = 2'-O-methyl modified nucleotide
  modified_base 54: mod_base = OTHER; note = nucleotide with phosphorothioate linkage
  modified_base 58: mod_base = OTHER; note = 2'-O-methyl modified nucleotide
  modified_base 59: mod_base = OTHER; note = 2'-O-methyl modified nucleotide
  modified_base 61: mod_base = OTHER; note = 2'-O-methyl modified nucleotide
  modified_base 62: mod_base = OTHER; note = 2'-O-methyl modified nucleotide
  modified_base 63: mod_base = OTHER; note = 2'-O-methyl modified nucleotide
  modified_base 64: mod_base = OTHER; note = 2'-O-methyl modified nucleotide
  modified_base 65: mod_base = OTHER; note = 2'-O-methyl modified nucleotide
  modified_base 66: mod_base = OTHER; note = 2'-O-methyl modified nucleotide
  modified_base 67: mod_base = OTHER; note = 2'-O-methyl modified nucleotide
  modified_base 68: mod_base = OTHER; note = 2'-O-methyl modified nucleotide
  modified_base 69: mod_base = OTHER; note = 2'-O-methyl modified nucleotide
  modified_base 70: mod_base = OTHER; note = 2'-O-methyl modified nucleotide
  modified_base 75: mod_base = OTHER; note = 2'-O-methyl modified nucleotide
  modified_base 77: mod_base = OTHER; note = 2'-O-methyl modified nucleotide
  modified_base 80: mod_base = OTHER; note = 2'-O-methyl modified nucleotide
  modified_base 86: mod_base = OTHER; note = 2'-O-methyl modified nucleotide
  modified_base 87: mod_base = OTHER; note = 2'-O-methyl modified nucleotide
  modified_base 89: mod_base = OTHER; note = 2'-O-methyl modified nucleotide
  modified_base 90: mod_base = OTHER; note = 2'-O-methyl modified nucleotide
  modified_base 91: mod_base = OTHER; note = 2'-O-methyl modified nucleotide
  modified_base 92: mod_base = OTHER; note = 2'-O-methyl modified nucleotide
  modified_base 99: mod_base = OTHER; note = nucleotide with phosphorothioate linkage
  modified_base 100: mod_base = OTHER; note = 2'-O-methyl modified nucleotide with phosphorothioate linkage
  modified_base 101: mod_base = OTHER; note = 2'-O-methyl modified nucleotide

SEQ ID NO: 2579 - RNA, 101 nt, synthetic construct; identical to SEQ ID NO: 1579
  source 1..101: mol_type = other RNA
  modified_base 1: mod_base = OTHER; note = 2'-O-methyl modified nucleotide with phosphorothioate linkage
  modified_base 2: mod_base = OTHER; note = 2'-O-methyl modified nucleotide with phosphorothioate linkage
  modified_base 3: mod_base = OTHER; note = 2'-O-methyl modified nucleotide with phosphorothioate linkage
  modified_base 4: mod_base = OTHER; note = 2'-O-methyl modified nucleotide
  modified_base 5: mod_base = OTHER; note = 2'-O-methyl modified nucleotide
  modified_base 8: mod_base = OTHER; note = 2'-O-methyl modified nucleotide
  modified_base 9: mod_base = OTHER; note = 2'-O-methyl modified nucleotide
  modified_base 11: mod_base = OTHER; note = 2'-O-methyl modified nucleotide
  modified_base 13: mod_base = OTHER; note = 2'-O-methyl modified nucleotide
  modified_base 18: mod_base = OTHER; note = 2'-O-methyl modified nucleotide
  modified_base 22: mod_base = OTHER; note = 2'-O-methyl modified nucleotide
  modified_base 25: mod_base = OTHER; note = 2'-O-methyl modified nucleotide
  modified_base 29: mod_base = OTHER; note = 2'-O-methyl modified nucleotide
  modified_base 30: mod_base = OTHER; note = 2'-O-methyl modified nucleotide
  modified_base 31: mod_base = OTHER; note = 2'-O-methyl modified nucleotide
  modified_base 32: mod_base = OTHER; note = 2'-O-methyl modified nucleotide
  modified_base 37: mod_base = OTHER; note = 2'-O-methyl modified nucleotide
  modified_base 38: mod_base = OTHER; note = 2'-O-methyl modified nucleotide
  modified_base 39: mod_base = OTHER; note = 2'-O-methyl modified nucleotide
  modified_base 40: mod_base = OTHER; note = 2'-O-methyl modified nucleotide
  modified_base 41: mod_base = OTHER; note = 2'-O-methyl modified nucleotide
  modified_base 42: mod_base = OTHER; note = 2'-O-methyl modified nucleotide
  modified_base 43: mod_base = OTHER; note = 2'-O-methyl modified nucleotide
  modified_base 47: mod_base = OTHER; note = 2'-O-methyl modified nucleotide
  modified_base 48: mod_base = OTHER; note = 2'-O-methyl modified nucleotide
  modified_base 51: mod_base = OTHER; note = 2'-O-methyl modified nucleotide
  modified_base 54: mod_base = OTHER; note = nucleotide with phosphorothioate linkage
  modified_base 58: mod_base = OTHER; note = 2'-O-methyl modified nucleotide
  modified_base 59: mod_base = OTHER; note = 2'-O-methyl modified nucleotide
  modified_base 61: mod_base = OTHER; note = 2'-O-methyl modified nucleotide
  modified_base 62: mod_base = OTHER; note = 2'-O-methyl modified nucleotide
  modified_base 63: mod_base = OTHER; note = 2'-O-methyl modified nucleotide
  modified_base 64: mod_base = OTHER; note = 2'-O-methyl modified nucleotide
  modified_base 65: mod_base = OTHER; note = 2'-O-methyl modified nucleotide
  modified_base 66: mod_base = OTHER; note = 2'-O-methyl modified nucleotide
  modified_base 67: mod_base = OTHER; note = 2'-O-methyl modified nucleotide
  modified_base 68: mod_base = OTHER; note = 2'-O-methyl modified nucleotide
  modified_base 69: mod_base = OTHER; note = 2'-O-methyl modified nucleotide
  modified_base 70: mod_base = OTHER; note = 2'-O-methyl modified nucleotide
  modified_base 75: mod_base = OTHER; note = 2'-O-methyl modified nucleotide
  modified_base 77: mod_base = OTHER; note = 2'-O-methyl modified nucleotide
  modified_base 80: mod_base = OTHER; note = 2'-O-methyl modified nucleotide
  modified_base 86: mod_base = OTHER; note = 2'-O-methyl modified nucleotide
  modified_base 87: mod_base = OTHER; note = 2'-O-methyl modified nucleotide
  modified_base 89: mod_base = OTHER; note = 2'-O-methyl modified nucleotide
  modified_base 90: mod_base = OTHER; note = 2'-O-methyl modified nucleotide
  modified_base 91: mod_base = OTHER; note = 2'-O-methyl modified nucleotide
  modified_base 92: mod_base = OTHER; note = 2'-O-methyl modified nucleotide
  modified_base 99: mod_base = OTHER; note = nucleotide with phosphorothioate linkage
  modified_base 100: mod_base = OTHER; note = 2'-O-methyl modified nucleotide with phosphorothioate linkage
  modified_base 101: mod_base = OTHER; note = 2'-O-methyl modified nucleotide

SEQ ID NO: 2580 - RNA, 101 nt, synthetic construct; identical to SEQ ID NO: 1580
  source 1..101: mol_type = other RNA
  modified_base 1: mod_base = OTHER; note = 2'-O-methyl modified nucleotide with phosphorothioate linkage
  modified_base 2: mod_base = OTHER; note = 2'-O-methyl modified nucleotide with phosphorothioate linkage
  modified_base 3: mod_base = OTHER; note = 2'-O-methyl modified nucleotide with phosphorothioate linkage
  modified_base 4: mod_base = OTHER; note = 2'-O-methyl modified nucleotide
  modified_base 5: mod_base = OTHER; note = 2'-O-methyl modified nucleotide
  modified_base 8: mod_base = OTHER; note = 2'-O-methyl modified nucleotide
  modified_base 9: mod_base = OTHER; note = 2'-O-methyl modified nucleotide
  modified_base 11: mod_base = OTHER; note = 2'-O-methyl modified nucleotide
  modified_base 13: mod_base = OTHER; note = 2'-O-methyl modified nucleotide
  modified_base 18: mod_base = OTHER; note = 2'-O-methyl modified nucleotide
  modified_base 22: mod_base = OTHER; note = 2'-O-methyl modified nucleotide
  modified_base 25: mod_base = OTHER; note = 2'-O-methyl modified nucleotide
  modified_base 29: mod_base = OTHER; note = 2'-O-methyl modified nucleotide
  modified_base 30: mod_base = OTHER; note = 2'-O-methyl modified nucleotide
  modified_base 31: mod_base = OTHER; note = 2'-O-methyl modified nucleotide
  modified_base 32: mod_base = OTHER; note = 2'-O-methyl modified nucleotide
  modified_base 37: mod_base = OTHER; note = 2'-O-methyl modified nucleotide
  modified_base 38: mod_base = OTHER; note = 2'-O-methyl modified nucleotide
  modified_base 39: mod_base = OTHER; note = 2'-O-methyl modified nucleotide
  modified_base 40: mod_base = OTHER; note = 2'-O-methyl modified nucleotide
  modified_base 41: mod_base = OTHER; note = 2'-O-methyl modified nucleotide
  modified_base 42: mod_base = OTHER; note = 2'-O-methyl modified nucleotide
  modified_base 43: mod_base = OTHER; note = 2'-O-methyl modified nucleotide
  modified_base 47: mod_base = OTHER; note = 2'-O-methyl modified nucleotide
  modified_base 48: mod_base = OTHER; note = 2'-O-methyl modified nucleotide
  modified_base 51: mod_base = OTHER; note = 2'-O-methyl modified nucleotide
  modified_base 54: mod_base = OTHER; note = nucleotide with phosphorothioate linkage
  modified_base 58: mod_base = OTHER; note = 2'-O-methyl modified nucleotide
  modified_base 59: mod_base = OTHER; note = 2'-O-methyl modified nucleotide
  modified_base 61: mod_base = OTHER; note = 2'-O-methyl modified nucleotide
  modified_base 62: mod_base = OTHER; note = 2'-O-methyl modified nucleotide
  modified_base 63: mod_base = OTHER; note = 2'-O-methyl modified nucleotide
  modified_base 64: mod_base = OTHER; note = 2'-O-methyl modified nucleotide
  modified_base 65: mod_base = OTHER; note = 2'-O-methyl modified nucleotide
  modified_base 66: mod_base = OTHER; note = 2'-O-methyl modified nucleotide
  modified_base 67: mod_base = OTHER; note = 2'-O-methyl modified nucleotide
  modified_base 68: mod_base = OTHER; note = 2'-O-methyl modified nucleotide
  modified_base 69: mod_base = OTHER; note = 2'-O-methyl modified nucleotide
  modified_base 70: mod_base = OTHER; note = 2'-O-methyl modified nucleotide
  modified_base 75: mod_base = OTHER; note = 2'-O-methyl modified nucleotide
  modified_base 77: mod_base = OTHER; note = 2'-O-methyl modified nucleotide
  modified_base 80: mod_base = OTHER; note = 2'-O-methyl modified nucleotide
  modified_base 86: mod_base = OTHER; note = 2'-O-methyl modified nucleotide
  modified_base 87: mod_base = OTHER; note = 2'-O-methyl modified nucleotide
  modified_base 89: mod_base = OTHER; note = 2'-O-methyl modified nucleotide
  modified_base 90: mod_base = OTHER; note = 2'-O-methyl modified nucleotide
  modified_base 91: mod_base = OTHER; note = 2'-O-methyl modified nucleotide
  modified_base 92: mod_base = OTHER; note = 2'-O-methyl modified nucleotide
  modified_base 99: mod_base = OTHER; note = nucleotide with phosphorothioate linkage
  modified_base 100: mod_base = OTHER; note = 2'-O-methyl modified nucleotide with phosphorothioate linkage
  modified_base 101: mod_base = OTHER; note = 2'-O-methyl modified nucleotide

SEQ ID NO: 2581 - RNA, 101 nt, synthetic construct; identical to SEQ ID NO: 1581
  source 1..101: mol_type = other RNA
  modified_base 1: mod_base = OTHER; note = 2'-O-methyl modified nucleotide with phosphorothioate linkage
  modified_base 2: mod_base = OTHER; note = 2'-O-methyl modified nucleotide with phosphorothioate linkage
  modified_base 3: mod_base = OTHER; note = 2'-O-methyl modified nucleotide with phosphorothioate linkage
  modified_base 4: mod_base = OTHER; note = 2'-O-methyl modified nucleotide
  modified_base 5: mod_base = OTHER; note = 2'-O-methyl modified nucleotide
  modified_base 8: mod_base = OTHER; note = 2'-O-methyl modified nucleotide
  modified_base 9: mod_base = OTHER; note = 2'-O-methyl modified nucleotide
  modified_base 11: mod_base = OTHER; note = 2'-O-methyl modified nucleotide
  modified_base 13: mod_base = OTHER; note = 2'-O-methyl modified nucleotide
  modified_base 18: mod_base = OTHER; note = 2'-O-methyl modified nucleotide
  modified_base 22: mod_base = OTHER; note = 2'-O-methyl modified nucleotide
  modified_base 25: mod_base = OTHER; note = 2'-O-methyl modified nucleotide
  modified_base 29: mod_base = OTHER; note = 2'-O-methyl modified nucleotide
  modified_base 30: mod_base = OTHER; note = 2'-O-methyl modified nucleotide
  modified_base 31: mod_base = OTHER; note = 2'-O-methyl modified nucleotide
  modified_base 32: mod_base = OTHER; note = 2'-O-methyl modified nucleotide
  modified_base 37: mod_base = OTHER; note = 2'-O-methyl modified nucleotide
  modified_base 38: mod_base = OTHER; note = 2'-O-methyl modified nucleotide
  modified_base 39: mod_base = OTHER; note = 2'-O-methyl modified nucleotide
  modified_base 40: mod_base = OTHER; note = 2'-O-methyl modified nucleotide
  modified_base 41: mod_base = OTHER; note = 2'-O-methyl modified nucleotide
  modified_base 42: mod_base = OTHER; note = 2'-O-methyl modified nucleotide
  modified_base 43: mod_base = OTHER; note = 2'-O-methyl modified nucleotide
  modified_base 47: mod_base = OTHER; note = 2'-O-methyl modified nucleotide
  modified_base 48: mod_base = OTHER; note = 2'-O-methyl modified nucleotide
  modified_base 51: mod_base = OTHER; note = 2'-O-methyl modified nucleotide
  modified_base 54: mod_base = OTHER; note = nucleotide with phosphorothioate linkage
  modified_base 58: mod_base = OTHER; note = 2'-O-methyl modified nucleotide
  modified_base 59: mod_base = OTHER; note = 2'-O-methyl modified nucleotide
  modified_base 61: mod_base = OTHER; note = 2'-O-methyl modified nucleotide
  modified_base 62: mod_base = OTHER; note = 2'-O-methyl modified nucleotide
  modified_base 63: mod_base = OTHER; note = 2'-O-methyl modified nucleotide
  modified_base 64: mod_base = OTHER; note = 2'-O-methyl modified nucleotide
  modified_base 65: mod_base = OTHER; note = 2'-O-methyl modified nucleotide
  modified_base 66: mod_base = OTHER; note = 2'-O-methyl modified nucleotide
  modified_base 67: mod_base = OTHER; note = 2'-O-methyl modified nucleotide
  modified_base 68: mod_base = OTHER; note = 2'-O-methyl modified nucleotide
  modified_base 69: mod_base = OTHER; note = 2'-O-methyl modified nucleotide
  modified_base 70: mod_base = OTHER; note = 2'-O-methyl modified nucleotide
  modified_base 75: mod_base = OTHER; note = 2'-O-methyl modified nucleotide
  modified_base 77: mod_base = OTHER; note = 2'-O-methyl modified nucleotide
  modified_base 80: mod_base = OTHER; note = 2'-O-methyl modified nucleotide
  modified_base 86: mod_base = OTHER; note = 2'-O-methyl modified nucleotide
  modified_base 87: mod_base = OTHER; note = 2'-O-methyl modified nucleotide
  modified_base 89: mod_base = OTHER; note = 2'-O-methyl modified nucleotide
  modified_base 90: mod_base = OTHER; note = 2'-O-methyl modified nucleotide
  modified_base 91: mod_base = OTHER; note = 2'-O-methyl modified nucleotide
  modified_base 92: mod_base = OTHER; note = 2'-O-methyl modified nucleotide
  modified_base 99: mod_base = OTHER; note = nucleotide with phosphorothioate linkage
  modified_base 100: mod_base = OTHER; note = 2'-O-methyl modified nucleotide with phosphorothioate linkage
  modified_base 101: mod_base = OTHER; note = 2'-O-methyl modified nucleotide

SEQ ID NO: 2582 - RNA, 101 nt, synthetic construct; identical to SEQ ID NO: 1582
  source 1..101: mol_type = other RNA
  modified_base 1: mod_base = OTHER; note = 2'-O-methyl modified nucleotide with phosphorothioate linkage
  modified_base 2: mod_base = OTHER; note = 2'-O-methyl modified nucleotide with phosphorothioate linkage
  modified_base 3: mod_base = OTHER; note = 2'-O-methyl modified nucleotide with phosphorothioate linkage
  modified_base 4: mod_base = OTHER; note = 2'-O-methyl modified nucleotide
  modified_base 5: mod_base = OTHER; note = 2'-O-methyl modified nucleotide
  modified_base 8: mod_base = OTHER; note = 2'-O-methyl modified nucleotide
  modified_base 9: mod_base = OTHER; note = 2'-O-methyl modified nucleotide
  modified_base 11: mod_base = OTHER; note = 2'-O-methyl modified nucleotide
  modified_base 13: mod_base = OTHER; note = 2'-O-methyl modified nucleotide
  modified_base 18: mod_base = OTHER; note = 2'-O-methyl modified nucleotide
  modified_base 22: mod_base = OTHER; note = 2'-O-methyl modified nucleotide
  modified_base 25: mod_base = OTHER; note = 2'-O-methyl modified nucleotide
  modified_base 29: mod_base = OTHER; note = 2'-O-methyl modified nucleotide
  modified_base 30: mod_base = OTHER; note = 2'-O-methyl modified nucleotide
  modified_base 31: mod_base = OTHER; note = 2'-O-methyl modified nucleotide
  modified_base 32: mod_base = OTHER; note = 2'-O-methyl modified nucleotide
  modified_base 37: mod_base = OTHER; note = 2'-O-methyl modified nucleotide
  modified_base 38: mod_base = OTHER; note = 2'-O-methyl modified nucleotide
  modified_base 39: mod_base = OTHER; note = 2'-O-methyl modified nucleotide
  modified_base 40: mod_base = OTHER; note = 2'-O-methyl modified nucleotide
  modified_base 41: mod_base = OTHER; note = 2'-O-methyl modified nucleotide
  modified_base 42: mod_base = OTHER; note = 2'-O-methyl modified nucleotide
  modified_base 43: mod_base = OTHER; note = 2'-O-methyl modified nucleotide
  modified_base 47: mod_base = OTHER; note = 2'-O-methyl modified nucleotide
  modified_base 48: mod_base = OTHER; note = 2'-O-methyl modified nucleotide
  modified_base 51: mod_base = OTHER; note = 2'-O-methyl modified nucleotide
  modified_base 54: mod_base = OTHER; note = nucleotide with phosphorothioate linkage
  modified_base 58: mod_base = OTHER; note = 2'-O-methyl modified nucleotide
  modified_base 59: mod_base = OTHER; note = 2'-O-methyl modified nucleotide
  modified_base 61: mod_base = OTHER; note = 2'-O-methyl modified nucleotide
  modified_base 62: mod_base = OTHER; note = 2'-O-methyl modified nucleotide
  modified_base 63: mod_base = OTHER; note = 2'-O-methyl modified nucleotide
  modified_base 64: mod_base = OTHER; note = 2'-O-methyl modified nucleotide
  modified_base 65: mod_base = OTHER; note = 2'-O-methyl modified nucleotide
  modified_base 66: mod_base = OTHER; note = 2'-O-methyl modified nucleotide
  modified_base 67: mod_base = OTHER; note = 2'-O-methyl modified nucleotide
  modified_base 68: mod_base = OTHER; note = 2'-O-methyl modified nucleotide
  modified_base 69: mod_base = OTHER; note = 2'-O-methyl modified nucleotide
  modified_base 70: mod_base = OTHER; note = 2'-O-methyl modified nucleotide
  modified_base 75: mod_base = OTHER; note = 2'-O-methyl modified nucleotide
  modified_base 77: mod_base = OTHER; note = 2'-O-methyl modified nucleotide
  modified_base 80: mod_base = OTHER; note = 2'-O-methyl modified nucleotide
  modified_base 86: mod_base = OTHER; note = 2'-O-methyl modified nucleotide
  modified_base 87: mod_base = OTHER; note = 2'-O-methyl modified nucleotide
  modified_base 89: mod_base = OTHER; note = 2'-O-methyl modified nucleotide
  modified_base 90: mod_base = OTHER; note = 2'-O-methyl modified nucleotide
  modified_base 91: mod_base = OTHER; note = 2'-O-methyl modified nucleotide
  modified_base 92: mod_base = OTHER; note = 2'-O-methyl modified nucleotide
  modified_base 99: mod_base = OTHER; note = nucleotide with phosphorothioate linkage
  modified_base 100: mod_base = OTHER; note = 2'-O-methyl modified nucleotide with phosphorothioate linkage
  modified_base 101: mod_base = OTHER; note = 2'-O-methyl modified nucleotide

SEQ ID NO: 2583 - RNA, 101 nt, synthetic construct; identical to SEQ ID NO: 1583
  source 1..101: mol_type = other RNA
  modified_base 1: mod_base = OTHER; note = 2'-O-methyl modified nucleotide with phosphorothioate linkage
  modified_base 2: mod_base = OTHER; note = 2'-O-methyl modified nucleotide with phosphorothioate linkage
  modified_base 3: mod_base = OTHER; note = 2'-O-methyl modified nucleotide with phosphorothioate linkage
  modified_base 4: mod_base = OTHER; note = 2'-O-methyl modified nucleotide
  modified_base 5: mod_base = OTHER; note = 2'-O-methyl modified nucleotide
  modified_base 8: mod_base = OTHER; note = 2'-O-methyl modified nucleotide
  modified_base 9: mod_base = OTHER; note = 2'-O-methyl modified nucleotide
  modified_base 11: mod_base = OTHER; note = 2'-O-methyl modified nucleotide
  modified_base 13: mod_base = OTHER; note = 2'-O-methyl modified nucleotide
  modified_base 18: mod_base = OTHER; note = 2'-O-methyl modified nucleotide
  modified_base 22: mod_base = OTHER; note = 2'-O-methyl modified nucleotide
  modified_base 25: mod_base = OTHER; note = 2'-O-methyl modified nucleotide
  modified_base 29: mod_base = OTHER; note = 2'-O-methyl modified nucleotide
  modified_base 30: mod_base = OTHER; note = 2'-O-methyl modified nucleotide
  modified_base 31: mod_base = OTHER; note = 2'-O-methyl modified nucleotide
  modified_base 32: mod_base = OTHER; note = 2'-O-methyl modified nucleotide
  modified_base 37: mod_base = OTHER; note = 2'-O-methyl modified nucleotide
  modified_base 38: mod_base = OTHER; note = 2'-O-methyl modified nucleotide
  modified_base 39: mod_base = OTHER; note = 2'-O-methyl modified nucleotide
  modified_base 40: mod_base = OTHER; note = 2'-O-methyl modified nucleotide
  modified_base 41: mod_base = OTHER; note = 2'-O-methyl modified nucleotide
  modified_base 42: mod_base = OTHER; note = 2'-O-methyl modified nucleotide
  modified_base 43: mod_base = OTHER; note = 2'-O-methyl modified nucleotide
  modified_base 47: mod_base = OTHER; note = 2'-O-methyl modified nucleotide
  modified_base 48: mod_base = OTHER; note = 2'-O-methyl modified nucleotide
  modified_base 51: mod_base = OTHER; note = 2'-O-methyl modified nucleotide
  modified_base 54: mod_base = OTHER; note = nucleotide with phosphorothioate linkage
  modified_base 58: mod_base = OTHER; note = 2'-O-methyl modified nucleotide
  modified_base 59: mod_base = OTHER; note = 2'-O-methyl modified nucleotide
  modified_base 61: mod_base = OTHER; note = 2'-O-methyl modified nucleotide
  modified_base 62: mod_base = OTHER; note = 2'-O-methyl modified nucleotide
  modified_base 63: mod_base = OTHER; note = 2'-O-methyl modified nucleotide
  modified_base 64: mod_base = OTHER; note = 2'-O-methyl modified nucleotide
  modified_base 65: mod_base = OTHER; note = 2'-O-methyl modified nucleotide
  modified_base 66: mod_base = OTHER; note = 2'-O-methyl modified nucleotide
  modified_base 67: mod_base = OTHER; note = 2'-O-methyl modified nucleotide
  modified_base 68: mod_base = OTHER; note = 2'-O-methyl modified nucleotide
  modified_base 69: mod_base = OTHER; note = 2'-O-methyl modified nucleotide
  modified_base 70: mod_base = OTHER; note = 2'-O-methyl modified nucleotide
  modified_base 75: mod_base = OTHER; note = 2'-O-methyl modified nucleotide
  modified_base 77: mod_base = OTHER; note = 2'-O-methyl modified nucleotide
  modified_base 80: mod_base = OTHER; note = 2'-O-methyl modified nucleotide
  modified_base 86: mod_base = OTHER; note = 2'-O-methyl modified nucleotide
  modified_base 87: mod_base = OTHER; note = 2'-O-methyl modified nucleotide
  modified_base 89: mod_base = OTHER; note = 2'-O-methyl modified nucleotide
  modified_base 90: mod_base = OTHER; note = 2'-O-methyl modified nucleotide
  modified_base 91: mod_base = OTHER; note = 2'-O-methyl modified nucleotide
  modified_base 92: mod_base = OTHER; note = 2'-O-methyl modified nucleotide
  modified_base 99: mod_base = OTHER; note = nucleotide with phosphorothioate linkage
  modified_base 100: mod_base = OTHER; note = 2'-O-methyl modified nucleotide with phosphorothioate linkage
  modified_base 101: mod_base = OTHER; note = 2'-O-methyl modified nucleotide

SEQ ID NO: 2584 - RNA, 101 nt, synthetic construct; identical to SEQ ID NO: 1584
  source 1..101: mol_type = other RNA
  modified_base 1: mod_base = OTHER; note = 2'-O-methyl modified nucleotide with phosphorothioate linkage
  modified_base 2: mod_base = OTHER; note = 2'-O-methyl modified nucleotide with phosphorothioate linkage
  modified_base 3: mod_base = OTHER; note = 2'-O-methyl modified nucleotide with phosphorothioate linkage
  modified_base 4: mod_base = OTHER; note = 2'-O-methyl modified nucleotide
  modified_base 5: mod_base = OTHER; note = 2'-O-methyl modified nucleotide
  modified_base 8: mod_base = OTHER; note = 2'-O-methyl modified nucleotide
  modified_base 9: mod_base = OTHER; note = 2'-O-methyl modified nucleotide
  modified_base 11: mod_base = OTHER; note = 2'-O-methyl modified nucleotide
  modified_base 13: mod_base = OTHER; note = 2'-O-methyl modified nucleotide
  modified_base 18: mod_base = OTHER; note = 2'-O-methyl modified nucleotide
  modified_base 22: mod_base = OTHER; note = 2'-O-methyl modified nucleotide
  modified_base 25: mod_base = OTHER; note = 2'-O-methyl modified nucleotide
  modified_base 29: mod_base = OTHER; note = 2'-O-methyl modified nucleotide
  modified_base 30: mod_base = OTHER; note = 2'-O-methyl modified nucleotide
  modified_base 31: mod_base = OTHER; note = 2'-O-methyl modified nucleotide
  modified_base 32: mod_base = OTHER; note = 2'-O-methyl modified nucleotide
  modified_base 37: mod_base = OTHER; note = 2'-O-methyl modified nucleotide
  modified_base 38: mod_base = OTHER; note = 2'-O-methyl modified nucleotide
  modified_base 39: mod_base = OTHER; note = 2'-O-methyl modified nucleotide
  modified_base 40: mod_base = OTHER; note = 2'-O-methyl modified nucleotide
  modified_base 41: mod_base = OTHER; note = 2'-O-methyl modified nucleotide
  modified_base 42: mod_base = OTHER; note = 2'-O-methyl modified nucleotide
  modified_base 43: mod_base = OTHER; note = 2'-O-methyl modified nucleotide
  modified_base 47: mod_base = OTHER; note = 2'-O-methyl modified nucleotide
  modified_base 48: mod_base = OTHER; note = 2'-O-methyl modified nucleotide
  modified_base 51: mod_base = OTHER; note = 2'-O-methyl modified nucleotide
  modified_base 54: mod_base = OTHER; note = nucleotide with phosphorothioate linkage
  modified_base 58: mod_base = OTHER; note = 2'-O-methyl modified nucleotide
  modified_base 59: mod_base = OTHER; note = 2'-O-methyl modified nucleotide
  modified_base 61: mod_base = OTHER; note = 2'-O-methyl modified nucleotide
  modified_base 62: mod_base = OTHER; note = 2'-O-methyl modified nucleotide
  modified_base 63: mod_base = OTHER; note = 2'-O-methyl modified nucleotide
  modified_base 64: mod_base = OTHER; note = 2'-O-methyl modified nucleotide
  modified_base 65: mod_base = OTHER; note = 2'-O-methyl modified nucleotide
  modified_base 66: mod_base = OTHER; note = 2'-O-methyl modified nucleotide
  modified_base 67: mod_base = OTHER; note = 2'-O-methyl modified nucleotide
  modified_base 68: mod_base = OTHER; note = 2'-O-methyl modified nucleotide
  modified_base 69: mod_base = OTHER; note = 2'-O-methyl modified nucleotide
  modified_base 70: mod_base = OTHER; note = 2'-O-methyl modified nucleotide
  modified_base 75: mod_base = OTHER; note = 2'-O-methyl modified nucleotide
  modified_base 77: mod_base = OTHER; note = 2'-O-methyl modified nucleotide
  modified_base 80: mod_base = OTHER; note = 2'-O-methyl modified nucleotide
  modified_base 86: mod_base = OTHER; note = 2'-O-methyl modified nucleotide
  modified_base 87: mod_base = OTHER; note = 2'-O-methyl modified nucleotide
  modified_base 89: mod_base = OTHER; note = 2'-O-methyl modified nucleotide
  modified_base 90: mod_base = OTHER; note = 2'-O-methyl modified nucleotide
  modified_base 91: mod_base = OTHER; note = 2'-O-methyl modified nucleotide
  modified_base 92: mod_base = OTHER; note = 2'-O-methyl modified nucleotide
  modified_base 99: mod_base = OTHER; note = nucleotide with phosphorothioate linkage
  modified_base 100: mod_base = OTHER; note = 2'-O-methyl modified nucleotide with phosphorothioate linkage
  modified_base 101: mod_base = OTHER; note = 2'-O-methyl modified nucleotide

SEQ ID NO: 2585 - RNA, 101 nt, synthetic construct; identical to SEQ ID NO: 1585
  source 1..101: mol_type = other RNA
  modified_base 1: mod_base = OTHER; note = 2'-O-methyl modified nucleotide with phosphorothioate linkage
  modified_base 2: mod_base = OTHER; note = 2'-O-methyl modified nucleotide with phosphorothioate linkage
  modified_base 3: mod_base = OTHER; note = 2'-O-methyl modified nucleotide with phosphorothioate linkage
  modified_base 4: mod_base = OTHER; note = 2'-O-methyl modified nucleotide
  modified_base 5: mod_base = OTHER; note = 2'-O-methyl modified nucleotide
  modified_base 8: mod_base = OTHER; note = 2'-O-methyl modified nucleotide
  modified_base 9: mod_base = OTHER; note = 2'-O-methyl modified nucleotide
  modified_base 11: mod_base = OTHER; note = 2'-O-methyl modified nucleotide
  modified_base 13: mod_base = OTHER; note = 2'-O-methyl modified nucleotide
  modified_base 18: mod_base = OTHER; note = 2'-O-methyl modified nucleotide
  modified_base 22: mod_base = OTHER; note = 2'-O-methyl modified nucleotide
  modified_base 25: mod_base = OTHER; note = 2'-O-methyl modified nucleotide
  modified_base 29: mod_base = OTHER; note = 2'-O-methyl modified nucleotide
  modified_base 30: mod_base = OTHER; note = 2'-O-methyl modified nucleotide
  modified_base 31: mod_base = OTHER; note = 2'-O-methyl modified nucleotide
  modified_base 32: mod_base = OTHER; note = 2'-O-methyl modified nucleotide
  modified_base 37: mod_base = OTHER; note = 2'-O-methyl modified nucleotide
  modified_base 38: mod_base = OTHER; note = 2'-O-methyl modified nucleotide
  modified_base 39: mod_base = OTHER; note = 2'-O-methyl modified nucleotide
  modified_base 40: mod_base = OTHER; note = 2'-O-methyl modified nucleotide
  modified_base 41: mod_base = OTHER; note = 2'-O-methyl modified nucleotide
  modified_base 42: mod_base = OTHER; note = 2'-O-methyl modified nucleotide
  modified_base 43: mod_base = OTHER; note = 2'-O-methyl modified nucleotide
  modified_base 47: mod_base = OTHER; note = 2'-O-methyl modified nucleotide
  modified_base 48: mod_base = OTHER; note = 2'-O-methyl modified nucleotide
  modified_base 51: mod_base = OTHER; note = 2'-O-methyl modified nucleotide
  modified_base 54: mod_base = OTHER; note = nucleotide with phosphorothioate linkage
  modified_base 58: mod_base = OTHER; note = 2'-O-methyl modified nucleotide
  modified_base 59: mod_base = OTHER; note = 2'-O-methyl modified nucleotide
  modified_base 61: mod_base = OTHER; note = 2'-O-methyl modified nucleotide
  modified_base 62: mod_base = OTHER; note = 2'-O-methyl modified nucleotide
  modified_base 63: mod_base = OTHER; note = 2'-O-methyl modified nucleotide
  modified_base 64: mod_base = OTHER; note = 2'-O-methyl modified nucleotide
  modified_base 65: mod_base = OTHER; note = 2'-O-methyl modified nucleotide
  modified_base 66: mod_base = OTHER; note = 2'-O-methyl modified nucleotide
  modified_base 67: mod_base = OTHER; note = 2'-O-methyl modified nucleotide
  modified_base 68: mod_base = OTHER; note = 2'-O-methyl modified nucleotide
  modified_base 69: mod_base = OTHER; note = 2'-O-methyl modified nucleotide
  modified_base 70: mod_base = OTHER; note = 2'-O-methyl modified nucleotide
  modified_base 75: mod_base = OTHER; note = 2'-O-methyl modified nucleotide
  modified_base 77: mod_base = OTHER; note = 2'-O-methyl modified nucleotide
  modified_base 80: mod_base = OTHER; note = 2'-O-methyl modified nucleotide
  modified_base 86: mod_base = OTHER; note = 2'-O-methyl modified nucleotide
  modified_base 87: mod_base = OTHER; note = 2'-O-methyl modified nucleotide
  modified_base 89: mod_base = OTHER; note = 2'-O-methyl modified nucleotide
  modified_base 90: mod_base = OTHER; note = 2'-O-methyl modified nucleotide
  modified_base 91: mod_base = OTHER; note = 2'-O-methyl modified nucleotide
  modified_base 92: mod_base = OTHER; note = 2'-O-methyl modified nucleotide
  modified_base 99: mod_base = OTHER; note = nucleotide with phosphorothioate linkage
  modified_base 100: mod_base = OTHER; note = 2'-O-methyl modified nucleotide with phosphorothioate linkage
  modified_base 101: mod_base = OTHER; note = 2'-O-methyl modified nucleotide

SEQ ID NO: 2586 - RNA, 101 nt, synthetic construct; identical to SEQ ID NO: 1586
  source 1..101: mol_type = other RNA
  modified_base 1: mod_base = OTHER; note = 2'-O-methyl modified nucleotide with phosphorothioate linkage
  modified_base 2: mod_base = OTHER; note = 2'-O-methyl modified nucleotide with phosphorothioate linkage
  modified_base 3: mod_base = OTHER; note = 2'-O-methyl modified nucleotide with phosphorothioate linkage
  modified_base 4: mod_base = OTHER; note = 2'-O-methyl modified nucleotide
  modified_base 5: mod_base = OTHER; note = 2'-O-methyl modified nucleotide
  modified_base 8: mod_base = OTHER; note = 2'-O-methyl modified nucleotide
  modified_base 9: mod_base = OTHER; note = 2'-O-methyl modified nucleotide
  modified_base 11: mod_base = OTHER; note = 2'-O-methyl modified nucleotide
  modified_base 13: mod_base = OTHER; note = 2'-O-methyl modified nucleotide
  modified_base 18: mod_base = OTHER; note = 2'-O-methyl modified nucleotide
  modified_base 22: mod_base = OTHER; note = 2'-O-methyl modified nucleotide
  modified_base 25: mod_base = OTHER; note = 2'-O-methyl modified nucleotide
  modified_base 29: mod_base = OTHER; note = 2'-O-methyl modified nucleotide
  modified_base 30: mod_base = OTHER; note = 2'-O-methyl modified nucleotide
  modified_base 31: mod_base = OTHER; note = 2'-O-methyl modified nucleotide
  modified_base 32: mod_base = OTHER; note = 2'-O-methyl modified nucleotide
  modified_base 37: mod_base = OTHER; note = 2'-O-methyl modified nucleotide
  modified_base 38: mod_base = OTHER; note = 2'-O-methyl modified nucleotide
  modified_base 39: mod_base = OTHER; note = 2'-O-methyl modified nucleotide
  modified_base 40: mod_base = OTHER; note = 2'-O-methyl modified nucleotide
  modified_base 41: mod_base = OTHER; note = 2'-O-methyl modified nucleotide
  modified_base 42: mod_base = OTHER; note = 2'-O-methyl modified nucleotide
  modified_base 43: mod_base = OTHER; note = 2'-O-methyl modified nucleotide
  modified_base 47: mod_base = OTHER; note = 2'-O-methyl modified nucleotide
  modified_base 48: mod_base = OTHER; note = 2'-O-methyl modified nucleotide
  modified_base 51: mod_base = OTHER; note = 2'-O-methyl modified nucleotide
  modified_base 54: mod_base = OTHER; note = nucleotide with phosphorothioate linkage
  modified_base 58: mod_base = OTHER; note = 2'-O-methyl modified nucleotide
  modified_base 59: mod_base = OTHER; note = 2'-O-methyl modified nucleotide
  modified_base 61: mod_base = OTHER; note = 2'-O-methyl modified nucleotide
  modified_base 62: mod_base = OTHER; note = 2'-O-methyl modified nucleotide
  modified_base 63: mod_base = OTHER; note = 2'-O-methyl modified nucleotide
  modified_base 64: mod_base = OTHER; note = 2'-O-methyl modified nucleotide
  modified_base 65: mod_base = OTHER; note = 2'-O-methyl modified nucleotide
  modified_base 66: mod_base = OTHER; note = 2'-O-methyl modified nucleotide
  modified_base 67: mod_base = OTHER; note = 2'-O-methyl modified nucleotide
  modified_base 68: mod_base = OTHER; note = 2'-O-methyl modified nucleotide
  modified_base 69: mod_base = OTHER; note = 2'-O-methyl modified nucleotide
  modified_base 70: mod_base = OTHER; note = 2'-O-methyl modified nucleotide
  modified_base 75: mod_base = OTHER; note = 2'-O-methyl modified nucleotide
  modified_base 77: mod_base = OTHER; note = 2'-O-methyl modified nucleotide
  modified_base 80: mod_base = OTHER; note = 2'-O-methyl modified nucleotide
  modified_base 86: mod_base = OTHER; note = 2'-O-methyl modified nucleotide
  modified_base 87: mod_base = OTHER; note = 2'-O-methyl modified nucleotide
  modified_base 89: mod_base = OTHER; note = 2'-O-methyl modified nucleotide
  modified_base 90: mod_base = OTHER; note = 2'-O-methyl modified nucleotide
  modified_base 91: mod_base = OTHER; note = 2'-O-methyl modified nucleotide
  modified_base 92: mod_base = OTHER; note = 2'-O-methyl modified nucleotide
  modified_base 99: mod_base = OTHER; note = nucleotide with phosphorothioate linkage
  modified_base 100: mod_base = OTHER; note = 2'-O-methyl modified nucleotide with phosphorothioate linkage
  modified_base 101: mod_base = OTHER; note = 2'-O-methyl modified nucleotide

SEQ ID NO: 2587 - RNA, 101 nt, synthetic construct; identical to SEQ ID NO: 1587
  source 1..101: mol_type = other RNA
  modified_base 1: mod_base = OTHER; note = 2'-O-methyl modified nucleotide with phosphorothioate linkage
  modified_base 2: mod_base = OTHER; note = 2'-O-methyl modified nucleotide with phosphorothioate linkage
  modified_base 3: mod_base = OTHER; note = 2'-O-methyl modified nucleotide with phosphorothioate linkage
  modified_base 4: mod_base = OTHER; note = 2'-O-methyl modified nucleotide
  modified_base 5: mod_base = OTHER; note = 2'-O-methyl modified nucleotide
  modified_base 8: mod_base = OTHER; note = 2'-O-methyl modified nucleotide
  modified_base 9: mod_base = OTHER; note = 2'-O-methyl modified nucleotide
  modified_base 11: mod_base = OTHER; note = 2'-O-methyl modified nucleotide
  modified_base 13: mod_base = OTHER; note = 2'-O-methyl modified nucleotide
  modified_base 18: mod_base = OTHER; note = 2'-O-methyl modified nucleotide
  modified_base 22: mod_base = OTHER; note = 2'-O-methyl modified nucleotide
  modified_base 25: mod_base = OTHER; note = 2'-O-methyl modified nucleotide
  modified_base 29: mod_base = OTHER; note = 2'-O-methyl modified nucleotide
  modified_base 30: mod_base = OTHER; note = 2'-O-methyl modified nucleotide
  modified_base 31: mod_base = OTHER; note = 2'-O-methyl modified nucleotide
  modified_base 32: mod_base = OTHER; note = 2'-O-methyl modified nucleotide
  modified_base 37: mod_base = OTHER; note = 2'-O-methyl modified nucleotide
  modified_base 38: mod_base = OTHER; note = 2'-O-methyl modified nucleotide
  modified_base 39: mod_base = OTHER; note = 2'-O-methyl modified nucleotide
  modified_base 40: mod_base = OTHER; note = 2'-O-methyl modified nucleotide
  modified_base 41: mod_base = OTHER; note = 2'-O-methyl modified nucleotide
  modified_base 42: mod_base = OTHER; note = 2'-O-methyl modified nucleotide
  modified_base 43: mod_base = OTHER; note = 2'-O-methyl modified nucleotide
  modified_base 47: mod_base = OTHER; note = 2'-O-methyl modified nucleotide
  modified_base 48: mod_base = OTHER; note = 2'-O-methyl modified nucleotide
  modified_base 51: mod_base = OTHER; note = 2'-O-methyl modified nucleotide
  modified_base 54: mod_base = OTHER; note = nucleotide with phosphorothioate linkage
  modified_base 58: mod_base = OTHER; note = 2'-O-methyl modified nucleotide
  modified_base 59: mod_base = OTHER; note = 2'-O-methyl modified nucleotide
  modified_base 61: mod_base = OTHER; note = 2'-O-methyl modified nucleotide
  modified_base 62: mod_base = OTHER; note = 2'-O-methyl modified nucleotide
  modified_base 63: mod_base = OTHER; note = 2'-O-methyl modified nucleotide
  modified_base 64: mod_base = OTHER; note = 2'-O-methyl modified nucleotide
  modified_base 65: mod_base = OTHER; note = 2'-O-methyl modified nucleotide
  modified_base 66: mod_base = OTHER; note = 2'-O-methyl modified nucleotide
  modified_base 67: mod_base = OTHER; note = 2'-O-methyl modified nucleotide
  modified_base 68: mod_base = OTHER; note = 2'-O-methyl modified nucleotide
  modified_base 69: mod_base = OTHER; note = 2'-O-methyl modified nucleotide
  modified_base 70: mod_base = OTHER; note = 2'-O-methyl modified nucleotide
  modified_base 75: mod_base = OTHER; note = 2'-O-methyl modified nucleotide
  modified_base 77: mod_base = OTHER; note = 2'-O-methyl modified nucleotide
  modified_base 80: mod_base = OTHER; note = 2'-O-methyl modified nucleotide
  modified_base 86: mod_base = OTHER; note = 2'-O-methyl modified nucleotide
  modified_base 87: mod_base = OTHER; note = 2'-O-methyl modified nucleotide
  modified_base 89: mod_base = OTHER; note = 2'-O-methyl modified nucleotide
  modified_base 90: mod_base = OTHER; note = 2'-O-methyl modified nucleotide
  modified_base 91: mod_base = OTHER; note = 2'-O-methyl modified nucleotide
  modified_base 92: mod_base = OTHER; note = 2'-O-methyl modified nucleotide
  modified_base 99: mod_base = OTHER; note = nucleotide with phosphorothioate linkage
  modified_base 100: mod_base = OTHER; note = 2'-O-methyl modified nucleotide with phosphorothioate linkage
  modified_base 101: mod_base = OTHER; note = 2'-O-methyl modified nucleotide

SEQ ID NO: 2588 - RNA, 101 nt, synthetic construct; identical to SEQ ID NO: 1588
  source 1..101: mol_type = other RNA
  modified_base 1: mod_base = OTHER; note = 2'-O-methyl modified nucleotide with phosphorothioate linkage
  modified_base 2: mod_base = OTHER; note = 2'-O-methyl modified nucleotide with phosphorothioate linkage
  modified_base 3: mod_base = OTHER; note = 2'-O-methyl modified nucleotide with phosphorothioate linkage
  modified_base 4: mod_base = OTHER; note = 2'-O-methyl modified nucleotide
  modified_base 5: mod_base = OTHER; note = 2'-O-methyl modified nucleotide
  modified_base 8: mod_base = OTHER; note = 2'-O-methyl modified nucleotide
  modified_base 9: mod_base = OTHER; note = 2'-O-methyl modified nucleotide
  modified_base 11: mod_base = OTHER; note = 2'-O-methyl modified nucleotide
  modified_base 13: mod_base = OTHER; note = 2'-O-methyl modified nucleotide
  modified_base 18: mod_base = OTHER; note = 2'-O-methyl modified nucleotide
  modified_base 22: mod_base = OTHER; note = 2'-O-methyl modified nucleotide
  modified_base 25: mod_base = OTHER; note = 2'-O-methyl modified nucleotide
  modified_base 29: mod_base = OTHER; note = 2'-O-methyl modified nucleotide
  modified_base 30: mod_base = OTHER; note = 2'-O-methyl modified nucleotide
  modified_base 31: mod_base = OTHER; note = 2'-O-methyl modified nucleotide
  modified_base 32: mod_base = OTHER; note = 2'-O-methyl modified nucleotide
  modified_base 37: mod_base = OTHER; note = 2'-O-methyl modified nucleotide
  modified_base 38: mod_base = OTHER; note = 2'-O-methyl modified nucleotide
  modified_base 39: mod_base = OTHER; note = 2'-O-methyl modified nucleotide
  modified_base 40: mod_base = OTHER; note = 2'-O-methyl modified nucleotide
  modified_base 41: mod_base = OTHER; note = 2'-O-methyl modified nucleotide
  modified_base 42: mod_base = OTHER; note = 2'-O-methyl modified nucleotide
  modified_base 43: mod_base = OTHER; note = 2'-O-methyl modified nucleotide
  modified_base 47: mod_base = OTHER; note = 2'-O-methyl modified nucleotide
  modified_base 48: mod_base = OTHER; note = 2'-O-methyl modified nucleotide
  modified_base 51: mod_base = OTHER; note = 2'-O-methyl modified nucleotide
  modified_base 54: mod_base = OTHER; note = nucleotide with phosphorothioate linkage
  modified_base 58: mod_base = OTHER; note = 2'-O-methyl modified nucleotide
  modified_base 59: mod_base = OTHER; note = 2'-O-methyl modified nucleotide
  modified_base 61: mod_base = OTHER; note = 2'-O-methyl modified nucleotide
  modified_base 62: mod_base = OTHER; note = 2'-O-methyl modified nucleotide
  modified_base 63: mod_base = OTHER; note = 2'-O-methyl modified nucleotide
  modified_base 64: mod_base = OTHER; note = 2'-O-methyl modified nucleotide
  modified_base 65: mod_base = OTHER; note = 2'-O-methyl modified nucleotide
  modified_base 66: mod_base = OTHER; note = 2'-O-methyl modified nucleotide
  modified_base 67: mod_base = OTHER; note = 2'-O-methyl modified nucleotide
  modified_base 68: mod_base = OTHER; note = 2'-O-methyl modified nucleotide
  modified_base 69: mod_base = OTHER; note = 2'-O-methyl modified nucleotide
  modified_base 70: mod_base = OTHER; note = 2'-O-methyl modified nucleotide
  modified_base 75: mod_base = OTHER; note = 2'-O-methyl modified nucleotide
  modified_base 77: mod_base = OTHER; note = 2'-O-methyl modified nucleotide
  modified_base 80: mod_base = OTHER; note = 2'-O-methyl modified nucleotide
  modified_base 86: mod_base = OTHER; note = 2'-O-methyl modified nucleotide
  modified_base 87: mod_base = OTHER; note = 2'-O-methyl modified nucleotide
  modified_base 89: mod_base = OTHER; note = 2'-O-methyl modified nucleotide
  modified_base 90: mod_base = OTHER; note = 2'-O-methyl modified nucleotide
  modified_base 91: mod_base = OTHER; note = 2'-O-methyl modified nucleotide
  modified_base 92: mod_base = OTHER; note = 2'-O-methyl modified nucleotide
  modified_base 99: mod_base = OTHER; note = nucleotide with phosphorothioate linkage
  modified_base 100: mod_base = OTHER; note = 2'-O-methyl modified nucleotide with phosphorothioate linkage
  modified_base 101: mod_base = OTHER; note = 2'-O-methyl modified nucleotide

SEQ ID NO: 2589 - RNA, 101 nt, synthetic construct; identical to SEQ ID NO: 1589
  source 1..101: mol_type = other RNA
  modified_base 1: mod_base = OTHER; note = 2'-O-methyl modified nucleotide with phosphorothioate linkage
  modified_base 2: mod_base = OTHER; note = 2'-O-methyl modified nucleotide with phosphorothioate linkage
  modified_base 3: mod_base = OTHER; note = 2'-O-methyl modified nucleotide with phosphorothioate linkage
  modified_base 4: mod_base = OTHER; note = 2'-O-methyl modified nucleotide
  modified_base 5: mod_base = OTHER; note = 2'-O-methyl modified nucleotide
  modified_base 8: mod_base = OTHER; note = 2'-O-methyl modified nucleotide
  modified_base 9: mod_base = OTHER; note = 2'-O-methyl modified nucleotide
  modified_base 11: mod_base = OTHER; note = 2'-O-methyl modified nucleotide
  modified_base 13: mod_base = OTHER; note = 2'-O-methyl modified nucleotide
  modified_base 18: mod_base = OTHER; note = 2'-O-methyl modified nucleotide
  modified_base 22: mod_base = OTHER; note = 2'-O-methyl modified nucleotide
  modified_base 25: mod_base = OTHER; note = 2'-O-methyl modified nucleotide
  modified_base 29: mod_base = OTHER; note = 2'-O-methyl modified nucleotide
  modified_base 30: mod_base = OTHER; note = 2'-O-methyl modified nucleotide
  modified_base 31: mod_base = OTHER; note = 2'-O-methyl modified nucleotide
  modified_base 32: mod_base = OTHER; note = 2'-O-methyl modified nucleotide
  modified_base 37: mod_base = OTHER; note = 2'-O-methyl modified nucleotide
  modified_base 38: mod_base = OTHER; note = 2'-O-methyl modified nucleotide
  modified_base 39: mod_base = OTHER; note = 2'-O-methyl modified nucleotide
  modified_base 40: mod_base = OTHER; note = 2'-O-methyl modified nucleotide
  modified_base 41: mod_base = OTHER; note = 2'-O-methyl modified nucleotide
  modified_base 42: mod_base = OTHER; note = 2'-O-methyl modified nucleotide
  modified_base 43: mod_base = OTHER; note = 2'-O-methyl modified nucleotide
  modified_base 47: mod_base = OTHER; note = 2'-O-methyl modified nucleotide
  modified_base 48: mod_base = OTHER; note = 2'-O-methyl modified nucleotide
  modified_base 51: mod_base = OTHER; note = 2'-O-methyl modified nucleotide
  modified_base 54: mod_base = OTHER; note = nucleotide with phosphorothioate linkage
  modified_base 58: mod_base = OTHER; note = 2'-O-methyl modified nucleotide
  modified_base 59: mod_base = OTHER; note = 2'-O-methyl modified nucleotide
  modified_base 61: mod_base = OTHER; note = 2'-O-methyl modified nucleotide
  modified_base 62: mod_base = OTHER; note = 2'-O-methyl modified nucleotide
  modified_base 63: mod_base = OTHER; note = 2'-O-methyl modified nucleotide
  modified_base 64: mod_base = OTHER; note = 2'-O-methyl modified nucleotide
  modified_base 65: mod_base = OTHER; note = 2'-O-methyl modified nucleotide
  modified_base 66: mod_base = OTHER; note = 2'-O-methyl modified nucleotide
  modified_base 67: mod_base = OTHER; note = 2'-O-methyl modified nucleotide
  modified_base 68: mod_base = OTHER; note = 2'-O-methyl modified nucleotide
  modified_base 69: mod_base = OTHER; note = 2'-O-methyl modified nucleotide
  modified_base 70: mod_base = OTHER; note = 2'-O-methyl modified nucleotide
  modified_base 75: mod_base = OTHER; note = 2'-O-methyl modified nucleotide
  modified_base 77: mod_base = OTHER; note = 2'-O-methyl modified nucleotide
  modified_base 80: mod_base = OTHER; note = 2'-O-methyl modified nucleotide
  modified_base 86: mod_base = OTHER; note = 2'-O-methyl modified nucleotide
  modified_base 87: mod_base = OTHER; note = 2'-O-methyl modified nucleotide
  modified_base 89: mod_base = OTHER; note = 2'-O-methyl modified nucleotide
  modified_base 90: mod_base = OTHER; note = 2'-O-methyl modified nucleotide
  modified_base 91: mod_base = OTHER; note = 2'-O-methyl modified nucleotide
  modified_base 92: mod_base = OTHER; note = 2'-O-methyl modified nucleotide
  modified_base 99: mod_base = OTHER; note = nucleotide with phosphorothioate linkage
  modified_base 100: mod_base = OTHER; note = 2'-O-methyl modified nucleotide with phosphorothioate linkage
  modified_base 101: mod_base = OTHER; note = 2'-O-methyl modified nucleotide

SEQ ID NO: 2590 - RNA, 101 nt, synthetic construct; identical to SEQ ID NO: 1590
  source 1..101: mol_type = other RNA
  modified_base 1: mod_base = OTHER; note = 2'-O-methyl modified nucleotide with phosphorothioate linkage
  modified_base 2: mod_base = OTHER; note = 2'-O-methyl modified nucleotide with phosphorothioate linkage
  modified_base 3: mod_base = OTHER; note = 2'-O-methyl modified nucleotide with phosphorothioate linkage
  modified_base 4: mod_base = OTHER; note = 2'-O-methyl modified nucleotide
  modified_base 5: mod_base = OTHER; note = 2'-O-methyl modified nucleotide
  modified_base 8: mod_base = OTHER; note = 2'-O-methyl modified nucleotide
  modified_base 9: mod_base = OTHER; note = 2'-O-methyl modified nucleotide
  modified_base 11: mod_base = OTHER; note = 2'-O-methyl modified nucleotide
  modified_base 13: mod_base = OTHER; note = 2'-O-methyl modified nucleotide
  modified_base 18: mod_base = OTHER; note = 2'-O-methyl modified nucleotide
  modified_base 22: mod_base = OTHER; note = 2'-O-methyl modified nucleotide
  modified_base 25: mod_base = OTHER; note = 2'-O-methyl modified nucleotide
  modified_base 29: mod_base = OTHER; note = 2'-O-methyl modified nucleotide
  modified_base 30: mod_base = OTHER; note = 2'-O-methyl modified nucleotide
  modified_base 31: mod_base = OTHER; note = 2'-O-methyl modified nucleotide
  modified_base 32: mod_base = OTHER; note = 2'-O-methyl modified nucleotide
  modified_base 37: mod_base = OTHER; note = 2'-O-methyl modified nucleotide
  modified_base 38: mod_base = OTHER; note = 2'-O-methyl modified nucleotide
  modified_base 39: mod_base = OTHER; note = 2'-O-methyl modified nucleotide
  modified_base 40: mod_base = OTHER; note = 2'-O-methyl modified nucleotide
  modified_base 41: mod_base = OTHER; note = 2'-O-methyl modified nucleotide
  modified_base 42: mod_base = OTHER; note = 2'-O-methyl modified nucleotide
  modified_base 43: mod_base = OTHER; note = 2'-O-methyl modified nucleotide
  modified_base 47: mod_base = OTHER; note = 2'-O-methyl modified nucleotide
  modified_base 48: mod_base = OTHER; note = 2'-O-methyl modified nucleotide
  modified_base 51: mod_base = OTHER; note = 2'-O-methyl modified nucleotide
  modified_base 54: mod_base = OTHER; note = nucleotide with phosphorothioate linkage
  modified_base 58: mod_base = OTHER; note = 2'-O-methyl modified nucleotide
  modified_base 59: mod_base = OTHER; note = 2'-O-methyl modified nucleotide
  modified_base 61: mod_base = OTHER; note = 2'-O-methyl modified nucleotide
  modified_base 62: mod_base = OTHER; note = 2'-O-methyl modified nucleotide
  modified_base 63: mod_base = OTHER; note = 2'-O-methyl modified nucleotide
  modified_base 64: mod_base = OTHER; note = 2'-O-methyl modified nucleotide
  modified_base 65: mod_base = OTHER; note = 2'-O-methyl modified nucleotide
  modified_base 66: mod_base = OTHER; note = 2'-O-methyl modified nucleotide
  modified_base 67: mod_base = OTHER; note = 2'-O-methyl modified nucleotide
  modified_base 68: mod_base = OTHER; note = 2'-O-methyl modified nucleotide
  modified_base 69: mod_base = OTHER; note = 2'-O-methyl modified nucleotide
  modified_base 70: mod_base = OTHER; note = 2'-O-methyl modified nucleotide
  modified_base 75: mod_base = OTHER; note = 2'-O-methyl modified nucleotide
  modified_base 77: mod_base = OTHER; note = 2'-O-methyl modified nucleotide
  modified_base 80: mod_base = OTHER; note = 2'-O-methyl modified nucleotide
  modified_base 86: mod_base = OTHER; note = 2'-O-methyl modified nucleotide
  modified_base 87: mod_base = OTHER; note = 2'-O-methyl modified nucleotide
  modified_base 89: mod_base = OTHER; note = 2'-O-methyl modified nucleotide
  modified_base 90: mod_base = OTHER; note = 2'-O-methyl modified nucleotide
  modified_base 91: mod_base = OTHER; note = 2'-O-methyl modified nucleotide
  modified_base 92: mod_base = OTHER; note = 2'-O-methyl modified nucleotide
  modified_base 99: mod_base = OTHER; note = nucleotide with phosphorothioate linkage
  modified_base 100: mod_base = OTHER; note = 2'-O-methyl modified nucleotide with phosphorothioate linkage
  modified_base 101: mod_base = OTHER; note = 2'-O-methyl modified nucleotide

SEQ ID NO: 2591-2604 - skipped (14 entries)

SEQ ID NO: 2605 - RNA, 101 nt, synthetic construct; identical to SEQ ID NO: 1605
  source 1..101: mol_type = other RNA
  modified_base 1: mod_base = OTHER; note = 2'-O-methyl modified nucleotide with phosphorothioate linkage
  modified_base 2: mod_base = OTHER; note = 2'-O-methyl modified nucleotide with phosphorothioate linkage
  modified_base 3: mod_base = OTHER; note = 2'-O-methyl modified nucleotide with phosphorothioate linkage
  modified_base 4: mod_base = OTHER; note = 2'-O-methyl modified nucleotide
  modified_base 5: mod_base = OTHER; note = 2'-O-methyl modified nucleotide
  modified_base 8: mod_base = OTHER; note = 2'-O-methyl modified nucleotide
  modified_base 9: mod_base = OTHER; note = 2'-O-methyl modified nucleotide
  modified_base 11: mod_base = OTHER; note = 2'-O-methyl modified nucleotide
  modified_base 13: mod_base = OTHER; note = 2'-O-methyl modified nucleotide
  modified_base 18: mod_base = OTHER; note = 2'-O-methyl modified nucleotide
  modified_base 22: mod_base = OTHER; note = 2'-O-methyl modified nucleotide
  modified_base 25: mod_base = OTHER; note = 2'-O-methyl modified nucleotide
  modified_base 29: mod_base = OTHER; note = 2'-O-methyl modified nucleotide
  modified_base 30: mod_base = OTHER; note = 2'-O-methyl modified nucleotide
  modified_base 31: mod_base = OTHER; note = 2'-O-methyl modified nucleotide
  modified_base 32: mod_base = OTHER; note = 2'-O-methyl modified nucleotide
  modified_base 37: mod_base = OTHER; note = 2'-O-methyl modified nucleotide
  modified_base 38: mod_base = OTHER; note = 2'-O-methyl modified nucleotide
  modified_base 39: mod_base = OTHER; note = 2'-O-methyl modified nucleotide
  modified_base 40: mod_base = OTHER; note = 2'-O-methyl modified nucleotide
  modified_base 41: mod_base = OTHER; note = 2'-O-methyl modified nucleotide
  modified_base 42: mod_base = OTHER; note = 2'-O-methyl modified nucleotide
  modified_base 43: mod_base = OTHER; note = 2'-O-methyl modified nucleotide
  modified_base 47: mod_base = OTHER; note = 2'-O-methyl modified nucleotide
  modified_base 48: mod_base = OTHER; note = 2'-O-methyl modified nucleotide
  modified_base 51: mod_base = OTHER; note = 2'-O-methyl modified nucleotide
  modified_base 54: mod_base = OTHER; note = nucleotide with phosphorothioate linkage
  modified_base 58: mod_base = OTHER; note = 2'-O-methyl modified nucleotide
  modified_base 59: mod_base = OTHER; note = 2'-O-methyl modified nucleotide
  modified_base 61: mod_base = OTHER; note = 2'-O-methyl modified nucleotide
  modified_base 62: mod_base = OTHER; note = 2'-O-methyl modified nucleotide
  modified_base 63: mod_base = OTHER; note = 2'-O-methyl modified nucleotide
  modified_base 64: mod_base = OTHER; note = 2'-O-methyl modified nucleotide
  modified_base 65: mod_base = OTHER; note = 2'-O-methyl modified nucleotide
  modified_base 66: mod_base = OTHER; note = 2'-O-methyl modified nucleotide
  modified_base 67: mod_base = OTHER; note = 2'-O-methyl modified nucleotide
  modified_base 68: mod_base = OTHER; note = 2'-O-methyl modified nucleotide
  modified_base 69: mod_base = OTHER; note = 2'-O-methyl modified nucleotide
  modified_base 70: mod_base = OTHER; note = 2'-O-methyl modified nucleotide
  modified_base 75: mod_base = OTHER; note = 2'-O-methyl modified nucleotide
  modified_base 77: mod_base = OTHER; note = 2'-O-methyl modified nucleotide
  modified_base 80: mod_base = OTHER; note = 2'-O-methyl modified nucleotide
  modified_base 86: mod_base = OTHER; note = 2'-O-methyl modified nucleotide
  modified_base 87: mod_base = OTHER; note = 2'-O-methyl modified nucleotide
  modified_base 89: mod_base = OTHER; note = 2'-O-methyl modified nucleotide
  modified_base 90: mod_base = OTHER; note = 2'-O-methyl modified nucleotide
  modified_base 91: mod_base = OTHER; note = 2'-O-methyl modified nucleotide
  modified_base 92: mod_base = OTHER; note = 2'-O-methyl modified nucleotide
  modified_base 99: mod_base = OTHER; note = nucleotide with phosphorothioate linkage
  modified_base 100: mod_base = OTHER; note = 2'-O-methyl modified nucleotide with phosphorothioate linkage
  modified_base 101: mod_base = OTHER; note = 2'-O-methyl modified nucleotide

SEQ ID NO: 2606 - RNA, 101 nt, synthetic construct; identical to SEQ ID NO: 1606
  source 1..101: mol_type = other RNA
  modified_base 1: mod_base = OTHER; note = 2'-O-methyl modified nucleotide with phosphorothioate linkage
  modified_base 2: mod_base = OTHER; note = 2'-O-methyl modified nucleotide with phosphorothioate linkage
  modified_base 3: mod_base = OTHER; note = 2'-O-methyl modified nucleotide with phosphorothioate linkage
  modified_base 4: mod_base = OTHER; note = 2'-O-methyl modified nucleotide
  modified_base 5: mod_base = OTHER; note = 2'-O-methyl modified nucleotide
  modified_base 8: mod_base = OTHER; note = 2'-O-methyl modified nucleotide
  modified_base 9: mod_base = OTHER; note = 2'-O-methyl modified nucleotide
  modified_base 11: mod_base = OTHER; note = 2'-O-methyl modified nucleotide
  modified_base 13: mod_base = OTHER; note = 2'-O-methyl modified nucleotide
  modified_base 18: mod_base = OTHER; note = 2'-O-methyl modified nucleotide
  modified_base 22: mod_base = OTHER; note = 2'-O-methyl modified nucleotide
  modified_base 25: mod_base = OTHER; note = 2'-O-methyl modified nucleotide
  modified_base 29: mod_base = OTHER; note = 2'-O-methyl modified nucleotide
  modified_base 30: mod_base = OTHER; note = 2'-O-methyl modified nucleotide
  modified_base 31: mod_base = OTHER; note = 2'-O-methyl modified nucleotide
  modified_base 32: mod_base = OTHER; note = 2'-O-methyl modified nucleotide
  modified_base 37: mod_base = OTHER; note = 2'-O-methyl modified nucleotide
  modified_base 38: mod_base = OTHER; note = 2'-O-methyl modified nucleotide
  modified_base 39: mod_base = OTHER; note = 2'-O-methyl modified nucleotide
  modified_base 40: mod_base = OTHER; note = 2'-O-methyl modified nucleotide
  modified_base 41: mod_base = OTHER; note = 2'-O-methyl modified nucleotide
  modified_base 42: mod_base = OTHER; note = 2'-O-methyl modified nucleotide
  modified_base 43: mod_base = OTHER; note = 2'-O-methyl modified nucleotide
  modified_base 47: mod_base = OTHER; note = 2'-O-methyl modified nucleotide
  modified_base 48: mod_base = OTHER; note = 2'-O-methyl modified nucleotide
  modified_base 51: mod_base = OTHER; note = 2'-O-methyl modified nucleotide
  modified_base 54: mod_base = OTHER; note = nucleotide with phosphorothioate linkage
  modified_base 58: mod_base = OTHER; note = 2'-O-methyl modified nucleotide
  modified_base 59: mod_base = OTHER; note = 2'-O-methyl modified nucleotide
  modified_base 61: mod_base = OTHER; note = 2'-O-methyl modified nucleotide
  modified_base 62: mod_base = OTHER; note = 2'-O-methyl modified nucleotide
  modified_base 63: mod_base = OTHER; note = 2'-O-methyl modified nucleotide
  modified_base 64: mod_base = OTHER; note = 2'-O-methyl modified nucleotide
  modified_base 65: mod_base = OTHER; note = 2'-O-methyl modified nucleotide
  modified_base 66: mod_base = OTHER; note = 2'-O-methyl modified nucleotide
  modified_base 67: mod_base = OTHER; note = 2'-O-methyl modified nucleotide
  modified_base 68: mod_base = OTHER; note = 2'-O-methyl modified nucleotide
  modified_base 69: mod_base = OTHER; note = 2'-O-methyl modified nucleotide
  modified_base 70: mod_base = OTHER; note = 2'-O-methyl modified nucleotide
  modified_base 75: mod_base = OTHER; note = 2'-O-methyl modified nucleotide
  modified_base 77: mod_base = OTHER; note = 2'-O-methyl modified nucleotide
  modified_base 80: mod_base = OTHER; note = 2'-O-methyl modified nucleotide
  modified_base 86: mod_base = OTHER; note = 2'-O-methyl modified nucleotide
  modified_base 87: mod_base = OTHER; note = 2'-O-methyl modified nucleotide
  modified_base 89: mod_base = OTHER; note = 2'-O-methyl modified nucleotide
  modified_base 90: mod_base = OTHER; note = 2'-O-methyl modified nucleotide
  modified_base 91: mod_base = OTHER; note = 2'-O-methyl modified nucleotide
  modified_base 92: mod_base = OTHER; note = 2'-O-methyl modified nucleotide
  modified_base 99: mod_base = OTHER; note = nucleotide with phosphorothioate linkage
  modified_base 100: mod_base = OTHER; note = 2'-O-methyl modified nucleotide with phosphorothioate linkage
  modified_base 101: mod_base = OTHER; note = 2'-O-methyl modified nucleotide

SEQ ID NO: 2607 - RNA, 101 nt, synthetic construct; identical to SEQ ID NO: 1607
  source 1..101: mol_type = other RNA
  modified_base 1: mod_base = OTHER; note = 2'-O-methyl modified nucleotide with phosphorothioate linkage
  modified_base 2: mod_base = OTHER; note = 2'-O-methyl modified nucleotide with phosphorothioate linkage
  modified_base 3: mod_base = OTHER; note = 2'-O-methyl modified nucleotide with phosphorothioate linkage
  modified_base 4: mod_base = OTHER; note = 2'-O-methyl modified nucleotide
  modified_base 5: mod_base = OTHER; note = 2'-O-methyl modified nucleotide
  modified_base 8: mod_base = OTHER; note = 2'-O-methyl modified nucleotide
  modified_base 9: mod_base = OTHER; note = 2'-O-methyl modified nucleotide
  modified_base 11: mod_base = OTHER; note = 2'-O-methyl modified nucleotide
  modified_base 13: mod_base = OTHER; note = 2'-O-methyl modified nucleotide
  modified_base 18: mod_base = OTHER; note = 2'-O-methyl modified nucleotide
  modified_base 22: mod_base = OTHER; note = 2'-O-methyl modified nucleotide
  modified_base 25: mod_base = OTHER; note = 2'-O-methyl modified nucleotide
  modified_base 29: mod_base = OTHER; note = 2'-O-methyl modified nucleotide
  modified_base 30: mod_base = OTHER; note = 2'-O-methyl modified nucleotide
  modified_base 31: mod_base = OTHER; note = 2'-O-methyl modified nucleotide
  modified_base 32: mod_base = OTHER; note = 2'-O-methyl modified nucleotide
  modified_base 37: mod_base = OTHER; note = 2'-O-methyl modified nucleotide
  modified_base 38: mod_base = OTHER; note = 2'-O-methyl modified nucleotide
  modified_base 39: mod_base = OTHER; note = 2'-O-methyl modified nucleotide
  modified_base 40: mod_base = OTHER; note = 2'-O-methyl modified nucleotide
  modified_base 41: mod_base = OTHER; note = 2'-O-methyl modified nucleotide
  modified_base 42: mod_base = OTHER; note = 2'-O-methyl modified nucleotide
  modified_base 43: mod_base = OTHER; note = 2'-O-methyl modified nucleotide
  modified_base 47: mod_base = OTHER; note = 2'-O-methyl modified nucleotide
  modified_base 48: mod_base = OTHER; note = 2'-O-methyl modified nucleotide
  modified_base 51: mod_base = OTHER; note = 2'-O-methyl modified nucleotide
  modified_base 54: mod_base = OTHER; note = nucleotide with phosphorothioate linkage
  modified_base 58: mod_base = OTHER; note = 2'-O-methyl modified nucleotide
  modified_base 59: mod_base = OTHER; note = 2'-O-methyl modified nucleotide
  modified_base 61: mod_base = OTHER; note = 2'-O-methyl modified nucleotide
  modified_base 62: mod_base = OTHER; note = 2'-O-methyl modified nucleotide
  modified_base 63: mod_base = OTHER; note = 2'-O-methyl modified nucleotide
  modified_base 64: mod_base = OTHER; note = 2'-O-methyl modified nucleotide
  modified_base 65: mod_base = OTHER; note = 2'-O-methyl modified nucleotide
  modified_base 66: mod_base = OTHER; note = 2'-O-methyl modified nucleotide
  modified_base 67: mod_base = OTHER; note = 2'-O-methyl modified nucleotide
  modified_base 68: mod_base = OTHER; note = 2'-O-methyl modified nucleotide
  modified_base 69: mod_base = OTHER; note = 2'-O-methyl modified nucleotide
  modified_base 70: mod_base = OTHER; note = 2'-O-methyl modified nucleotide
  modified_base 75: mod_base = OTHER; note = 2'-O-methyl modified nucleotide
  modified_base 77: mod_base = OTHER; note = 2'-O-methyl modified nucleotide
  modified_base 80: mod_base = OTHER; note = 2'-O-methyl modified nucleotide
  modified_base 86: mod_base = OTHER; note = 2'-O-methyl modified nucleotide
  modified_base 87: mod_base = OTHER; note = 2'-O-methyl modified nucleotide
  modified_base 89: mod_base = OTHER; note = 2'-O-methyl modified nucleotide
  modified_base 90: mod_base = OTHER; note = 2'-O-methyl modified nucleotide
  modified_base 91: mod_base = OTHER; note = 2'-O-methyl modified nucleotide
  modified_base 92: mod_base = OTHER; note = 2'-O-methyl modified nucleotide
  modified_base 99: mod_base = OTHER; note = nucleotide with phosphorothioate linkage
  modified_base 100: mod_base = OTHER; note = 2'-O-methyl modified nucleotide with phosphorothioate linkage
  modified_base 101: mod_base = OTHER; note = 2'-O-methyl modified nucleotide

SEQ ID NO: 2608 - RNA, 101 nt, synthetic construct; identical to SEQ ID NO: 1608
  source 1..101: mol_type = other RNA
  modified_base 1: mod_base = OTHER; note = 2'-O-methyl modified nucleotide with phosphorothioate linkage
  modified_base 2: mod_base = OTHER; note = 2'-O-methyl modified nucleotide with phosphorothioate linkage
  modified_base 3: mod_base = OTHER; note = 2'-O-methyl modified nucleotide with phosphorothioate linkage
  modified_base 4: mod_base = OTHER; note = 2'-O-methyl modified nucleotide
  modified_base 5: mod_base = OTHER; note = 2'-O-methyl modified nucleotide
  modified_base 8: mod_base = OTHER; note = 2'-O-methyl modified nucleotide
  modified_base 9: mod_base = OTHER; note = 2'-O-methyl modified nucleotide
  modified_base 11: mod_base = OTHER; note = 2'-O-methyl modified nucleotide
  modified_base 13: mod_base = OTHER; note = 2'-O-methyl modified nucleotide
  modified_base 18: mod_base = OTHER; note = 2'-O-methyl modified nucleotide
  modified_base 22: mod_base = OTHER; note = 2'-O-methyl modified nucleotide
  modified_base 25: mod_base = OTHER; note = 2'-O-methyl modified nucleotide
  modified_base 29: mod_base = OTHER; note = 2'-O-methyl modified nucleotide
  modified_base 30: mod_base = OTHER; note = 2'-O-methyl modified nucleotide
  modified_base 31: mod_base = OTHER; note = 2'-O-methyl modified nucleotide
  modified_base 32: mod_base = OTHER; note = 2'-O-methyl modified nucleotide
  modified_base 37: mod_base = OTHER; note = 2'-O-methyl modified nucleotide
  modified_base 38: mod_base = OTHER; note = 2'-O-methyl modified nucleotide
  modified_base 39: mod_base = OTHER; note = 2'-O-methyl modified nucleotide
  modified_base 40: mod_base = OTHER; note = 2'-O-methyl modified nucleotide
  modified_base 41: mod_base = OTHER; note = 2'-O-methyl modified nucleotide
  modified_base 42: mod_base = OTHER; note = 2'-O-methyl modified nucleotide
  modified_base 43: mod_base = OTHER; note = 2'-O-methyl modified nucleotide
  modified_base 47: mod_base = OTHER; note = 2'-O-methyl modified nucleotide
  modified_base 48: mod_base = OTHER; note = 2'-O-methyl modified nucleotide
  modified_base 51: mod_base = OTHER; note = 2'-O-methyl modified nucleotide
  modified_base 54: mod_base = OTHER; note = nucleotide with phosphorothioate linkage
  modified_base 58: mod_base = OTHER; note = 2'-O-methyl modified nucleotide
  modified_base 59: mod_base = OTHER; note = 2'-O-methyl modified nucleotide
  modified_base 61: mod_base = OTHER; note = 2'-O-methyl modified nucleotide
  modified_base 62: mod_base = OTHER; note = 2'-O-methyl modified nucleotide
  modified_base 63: mod_base = OTHER; note = 2'-O-methyl modified nucleotide
  modified_base 64: mod_base = OTHER; note = 2'-O-methyl modified nucleotide
  modified_base 65: mod_base = OTHER; note = 2'-O-methyl modified nucleotide
  modified_base 66: mod_base = OTHER; note = 2'-O-methyl modified nucleotide
  modified_base 67: mod_base = OTHER; note = 2'-O-methyl modified nucleotide
  modified_base 68: mod_base = OTHER; note = 2'-O-methyl modified nucleotide
  modified_base 69: mod_base = OTHER; note = 2'-O-methyl modified nucleotide
  modified_base 70: mod_base = OTHER; note = 2'-O-methyl modified nucleotide
  modified_base 75: mod_base = OTHER; note = 2'-O-methyl modified nucleotide
  modified_base 77: mod_base = OTHER; note = 2'-O-methyl modified nucleotide
  modified_base 80: mod_base = OTHER; note = 2'-O-methyl modified nucleotide
  modified_base 86: mod_base = OTHER; note = 2'-O-methyl modified nucleotide
  modified_base 87: mod_base = OTHER; note = 2'-O-methyl modified nucleotide
  modified_base 89: mod_base = OTHER; note = 2'-O-methyl modified nucleotide
  modified_base 90: mod_base = OTHER; note = 2'-O-methyl modified nucleotide
  modified_base 91: mod_base = OTHER; note = 2'-O-methyl modified nucleotide
  modified_base 92: mod_base = OTHER; note = 2'-O-methyl modified nucleotide
  modified_base 99: mod_base = OTHER; note = nucleotide with phosphorothioate linkage
  modified_base 100: mod_base = OTHER; note = 2'-O-methyl modified nucleotide with phosphorothioate linkage
  modified_base 101: mod_base = OTHER; note = 2'-O-methyl modified nucleotide

SEQ ID NO: 2609 - RNA, 101 nt, synthetic construct; identical to SEQ ID NO: 1609
  source 1..101: mol_type = other RNA
  modified_base 1: mod_base = OTHER; note = 2'-O-methyl modified nucleotide with phosphorothioate linkage
  modified_base 2: mod_base = OTHER; note = 2'-O-methyl modified nucleotide with phosphorothioate linkage
  modified_base 3: mod_base = OTHER; note = 2'-O-methyl modified nucleotide with phosphorothioate linkage
  modified_base 4: mod_base = OTHER; note = 2'-O-methyl modified nucleotide
  modified_base 5: mod_base = OTHER; note = 2'-O-methyl modified nucleotide
  modified_base 8: mod_base = OTHER; note = 2'-O-methyl modified nucleotide
  modified_base 9: mod_base = OTHER; note = 2'-O-methyl modified nucleotide
  modified_base 11: mod_base = OTHER; note = 2'-O-methyl modified nucleotide
  modified_base 13: mod_base = OTHER; note = 2'-O-methyl modified nucleotide
  modified_base 18: mod_base = OTHER; note = 2'-O-methyl modified nucleotide
  modified_base 22: mod_base = OTHER; note = 2'-O-methyl modified nucleotide
  modified_base 25: mod_base = OTHER; note = 2'-O-methyl modified nucleotide
  modified_base 29: mod_base = OTHER; note = 2'-O-methyl modified nucleotide
  modified_base 30: mod_base = OTHER; note = 2'-O-methyl modified nucleotide
  modified_base 31: mod_base = OTHER; note = 2'-O-methyl modified nucleotide
  modified_base 32: mod_base = OTHER; note = 2'-O-methyl modified nucleotide
  modified_base 37: mod_base = OTHER; note = 2'-O-methyl modified nucleotide
  modified_base 38: mod_base = OTHER; note = 2'-O-methyl modified nucleotide
  modified_base 39: mod_base = OTHER; note = 2'-O-methyl modified nucleotide
  modified_base 40: mod_base = OTHER; note = 2'-O-methyl modified nucleotide
  modified_base 41: mod_base = OTHER; note = 2'-O-methyl modified nucleotide
  modified_base 42: mod_base = OTHER; note = 2'-O-methyl modified nucleotide
  modified_base 43: mod_base = OTHER; note = 2'-O-methyl modified nucleotide
  modified_base 47: mod_base = OTHER; note = 2'-O-methyl modified nucleotide
  modified_base 48: mod_base = OTHER; note = 2'-O-methyl modified nucleotide
  modified_base 51: mod_base = OTHER; note = 2'-O-methyl modified nucleotide
  modified_base 54: mod_base = OTHER; note = nucleotide with phosphorothioate linkage
  modified_base 58: mod_base = OTHER; note = 2'-O-methyl modified nucleotide
  modified_base 59: mod_base = OTHER; note = 2'-O-methyl modified nucleotide
  modified_base 61: mod_base = OTHER; note = 2'-O-methyl modified nucleotide
  modified_base 62: mod_base = OTHER; note = 2'-O-methyl modified nucleotide
  modified_base 63: mod_base = OTHER; note = 2'-O-methyl modified nucleotide
  modified_base 64: mod_base = OTHER; note = 2'-O-methyl modified nucleotide
  modified_base 65: mod_base = OTHER; note = 2'-O-methyl modified nucleotide
  modified_base 66: mod_base = OTHER; note = 2'-O-methyl modified nucleotide
  modified_base 67: mod_base = OTHER; note = 2'-O-methyl modified nucleotide
  modified_base 68: mod_base = OTHER; note = 2'-O-methyl modified nucleotide
  modified_base 69: mod_base = OTHER; note = 2'-O-methyl modified nucleotide
  modified_base 70: mod_base = OTHER; note = 2'-O-methyl modified nucleotide
  modified_base 75: mod_base = OTHER; note = 2'-O-methyl modified nucleotide
  modified_base 77: mod_base = OTHER; note = 2'-O-methyl modified nucleotide
  modified_base 80: mod_base = OTHER; note = 2'-O-methyl modified nucleotide
  modified_base 86: mod_base = OTHER; note = 2'-O-methyl modified nucleotide
  modified_base 87: mod_base = OTHER; note = 2'-O-methyl modified nucleotide
  modified_base 89: mod_base = OTHER; note = 2'-O-methyl modified nucleotide
  modified_base 90: mod_base = OTHER; note = 2'-O-methyl modified nucleotide
  modified_base 91: mod_base = OTHER; note = 2'-O-methyl modified nucleotide
  modified_base 92: mod_base = OTHER; note = 2'-O-methyl modified nucleotide
  modified_base 99: mod_base = OTHER; note = nucleotide with phosphorothioate linkage
  modified_base 100: mod_base = OTHER; note = 2'-O-methyl modified nucleotide with phosphorothioate linkage
  modified_base 101: mod_base = OTHER; note = 2'-O-methyl modified nucleotide

SEQ ID NO: 2610 - RNA, 101 nt, synthetic construct; identical to SEQ ID NO: 1610
  source 1..101: mol_type = other RNA
  modified_base 1: mod_base = OTHER; note = 2'-O-methyl modified nucleotide with phosphorothioate linkage
  modified_base 2: mod_base = OTHER; note = 2'-O-methyl modified nucleotide with phosphorothioate linkage
  modified_base 3: mod_base = OTHER; note = 2'-O-methyl modified nucleotide with phosphorothioate linkage
  modified_base 4: mod_base = OTHER; note = 2'-O-methyl modified nucleotide
  modified_base 5: mod_base = OTHER; note = 2'-O-methyl modified nucleotide
  modified_base 8: mod_base = OTHER; note = 2'-O-methyl modified nucleotide
  modified_base 9: mod_base = OTHER; note = 2'-O-methyl modified nucleotide
  modified_base 11: mod_base = OTHER; note = 2'-O-methyl modified nucleotide
  modified_base 13: mod_base = OTHER; note = 2'-O-methyl modified nucleotide
  modified_base 18: mod_base = OTHER; note = 2'-O-methyl modified nucleotide
  modified_base 22: mod_base = OTHER; note = 2'-O-methyl modified nucleotide
  modified_base 25: mod_base = OTHER; note = 2'-O-methyl modified nucleotide
  modified_base 29: mod_base = OTHER; note = 2'-O-methyl modified nucleotide
  modified_base 30: mod_base = OTHER; note = 2'-O-methyl modified nucleotide
  modified_base 31: mod_base = OTHER; note = 2'-O-methyl modified nucleotide
  modified_base 32: mod_base = OTHER; note = 2'-O-methyl modified nucleotide
  modified_base 37: mod_base = OTHER; note = 2'-O-methyl modified nucleotide
  modified_base 38: mod_base = OTHER; note = 2'-O-methyl modified nucleotide
  modified_base 39: mod_base = OTHER; note = 2'-O-methyl modified nucleotide
  modified_base 40: mod_base = OTHER; note = 2'-O-methyl modified nucleotide
  modified_base 41: mod_base = OTHER; note = 2'-O-methyl modified nucleotide
  modified_base 42: mod_base = OTHER; note = 2'-O-methyl modified nucleotide
  modified_base 43: mod_base = OTHER; note = 2'-O-methyl modified nucleotide
  modified_base 47: mod_base = OTHER; note = 2'-O-methyl modified nucleotide
  modified_base 48: mod_base = OTHER; note = 2'-O-methyl modified nucleotide
  modified_base 51: mod_base = OTHER; note = 2'-O-methyl modified nucleotide
  modified_base 54: mod_base = OTHER; note = nucleotide with phosphorothioate linkage
  modified_base 58: mod_base = OTHER; note = 2'-O-methyl modified nucleotide
  modified_base 59: mod_base = OTHER; note = 2'-O-methyl modified nucleotide
  modified_base 61: mod_base = OTHER; note = 2'-O-methyl modified nucleotide
  modified_base 62: mod_base = OTHER; note = 2'-O-methyl modified nucleotide
  modified_base 63: mod_base = OTHER; note = 2'-O-methyl modified nucleotide
  modified_base 64: mod_base = OTHER; note = 2'-O-methyl modified nucleotide
  modified_base 65: mod_base = OTHER; note = 2'-O-methyl modified nucleotide
  modified_base 66: mod_base = OTHER; note = 2'-O-methyl modified nucleotide
  modified_base 67: mod_base = OTHER; note = 2'-O-methyl modified nucleotide
  modified_base 68: mod_base = OTHER; note = 2'-O-methyl modified nucleotide
  modified_base 69: mod_base = OTHER; note = 2'-O-methyl modified nucleotide
  modified_base 70: mod_base = OTHER; note = 2'-O-methyl modified nucleotide
  modified_base 75: mod_base = OTHER; note = 2'-O-methyl modified nucleotide
  modified_base 77: mod_base = OTHER; note = 2'-O-methyl modified nucleotide
  modified_base 80: mod_base = OTHER; note = 2'-O-methyl modified nucleotide
  modified_base 86: mod_base = OTHER; note = 2'-O-methyl modified nucleotide
  modified_base 87: mod_base = OTHER; note = 2'-O-methyl modified nucleotide
  modified_base 89: mod_base = OTHER; note = 2'-O-methyl modified nucleotide
  modified_base 90: mod_base = OTHER; note = 2'-O-methyl modified nucleotide
  modified_base 91: mod_base = OTHER; note = 2'-O-methyl modified nucleotide
  modified_base 92: mod_base = OTHER; note = 2'-O-methyl modified nucleotide
  modified_base 99: mod_base = OTHER; note = nucleotide with phosphorothioate linkage
  modified_base 100: mod_base = OTHER; note = 2'-O-methyl modified nucleotide with phosphorothioate linkage
  modified_base 101: mod_base = OTHER; note = 2'-O-methyl modified nucleotide

SEQ ID NO: 2611 - RNA, 101 nt, synthetic construct; identical to SEQ ID NO: 1611
  source 1..101: mol_type = other RNA
  modified_base 1: mod_base = OTHER; note = 2'-O-methyl modified nucleotide with phosphorothioate linkage
  modified_base 2: mod_base = OTHER; note = 2'-O-methyl modified nucleotide with phosphorothioate linkage
  modified_base 3: mod_base = OTHER; note = 2'-O-methyl modified nucleotide with phosphorothioate linkage
  modified_base 4: mod_base = OTHER; note = 2'-O-methyl modified nucleotide
  modified_base 5: mod_base = OTHER; note = 2'-O-methyl modified nucleotide
  modified_base 8: mod_base = OTHER; note = 2'-O-methyl modified nucleotide
  modified_base 9: mod_base = OTHER; note = 2'-O-methyl modified nucleotide
  modified_base 11: mod_base = OTHER; note = 2'-O-methyl modified nucleotide
  modified_base 13: mod_base = OTHER; note = 2'-O-methyl modified nucleotide
  modified_base 18: mod_base = OTHER; note = 2'-O-methyl modified nucleotide
  modified_base 22: mod_base = OTHER; note = 2'-O-methyl modified nucleotide
  modified_base 25: mod_base = OTHER; note = 2'-O-methyl modified nucleotide
  modified_base 29: mod_base = OTHER; note = 2'-O-methyl modified nucleotide
  modified_base 30: mod_base = OTHER; note = 2'-O-methyl modified nucleotide
  modified_base 31: mod_base = OTHER; note = 2'-O-methyl modified nucleotide
  modified_base 32: mod_base = OTHER; note = 2'-O-methyl modified nucleotide
  modified_base 37: mod_base = OTHER; note = 2'-O-methyl modified nucleotide
  modified_base 38: mod_base = OTHER; note = 2'-O-methyl modified nucleotide
  modified_base 39: mod_base = OTHER; note = 2'-O-methyl modified nucleotide
  modified_base 40: mod_base = OTHER; note = 2'-O-methyl modified nucleotide
  modified_base 41: mod_base = OTHER; note = 2'-O-methyl modified nucleotide
  modified_base 42: mod_base = OTHER; note = 2'-O-methyl modified nucleotide
  modified_base 43: mod_base = OTHER; note = 2'-O-methyl modified nucleotide
  modified_base 47: mod_base = OTHER; note = 2'-O-methyl modified nucleotide
  modified_base 48: mod_base = OTHER; note = 2'-O-methyl modified nucleotide
  modified_base 51: mod_base = OTHER; note = 2'-O-methyl modified nucleotide
  modified_base 54: mod_base = OTHER; note = nucleotide with phosphorothioate linkage
  modified_base 58: mod_base = OTHER; note = 2'-O-methyl modified nucleotide
  modified_base 59: mod_base = OTHER; note = 2'-O-methyl modified nucleotide
  modified_base 61: mod_base = OTHER; note = 2'-O-methyl modified nucleotide
  modified_base 62: mod_base = OTHER; note = 2'-O-methyl modified nucleotide
  modified_base 63: mod_base = OTHER; note = 2'-O-methyl modified nucleotide
  modified_base 64: mod_base = OTHER; note = 2'-O-methyl modified nucleotide
  modified_base 65: mod_base = OTHER; note = 2'-O-methyl modified nucleotide
  modified_base 66: mod_base = OTHER; note = 2'-O-methyl modified nucleotide
  modified_base 67: mod_base = OTHER; note = 2'-O-methyl modified nucleotide
  modified_base 68: mod_base = OTHER; note = 2'-O-methyl modified nucleotide
  modified_base 69: mod_base = OTHER; note = 2'-O-methyl modified nucleotide
  modified_base 70: mod_base = OTHER; note = 2'-O-methyl modified nucleotide
  modified_base 75: mod_base = OTHER; note = 2'-O-methyl modified nucleotide
  modified_base 77: mod_base = OTHER; note = 2'-O-methyl modified nucleotide
  modified_base 80: mod_base = OTHER; note = 2'-O-methyl modified nucleotide
  modified_base 86: mod_base = OTHER; note = 2'-O-methyl modified nucleotide
  modified_base 87: mod_base = OTHER; note = 2'-O-methyl modified nucleotide
  modified_base 89: mod_base = OTHER; note = 2'-O-methyl modified nucleotide
  modified_base 90: mod_base = OTHER; note = 2'-O-methyl modified nucleotide
  modified_base 91: mod_base = OTHER; note = 2'-O-methyl modified nucleotide
  modified_base 92: mod_base = OTHER; note = 2'-O-methyl modified nucleotide
  modified_base 99: mod_base = OTHER; note = nucleotide with phosphorothioate linkage
  modified_base 100: mod_base = OTHER; note = 2'-O-methyl modified nucleotide with phosphorothioate linkage
  modified_base 101: mod_base = OTHER; note = 2'-O-methyl modified nucleotide

SEQ ID NO: 2612 - RNA, 101 nt, synthetic construct; identical to SEQ ID NO: 1612
  source 1..101: mol_type = other RNA
  modified_base 1: mod_base = OTHER; note = 2'-O-methyl modified nucleotide with phosphorothioate linkage
  modified_base 2: mod_base = OTHER; note = 2'-O-methyl modified nucleotide with phosphorothioate linkage
  modified_base 3: mod_base = OTHER; note = 2'-O-methyl modified nucleotide with phosphorothioate linkage
  modified_base 4: mod_base = OTHER; note = 2'-O-methyl modified nucleotide
  modified_base 5: mod_base = OTHER; note = 2'-O-methyl modified nucleotide
  modified_base 8: mod_base = OTHER; note = 2'-O-methyl modified nucleotide
  modified_base 9: mod_base = OTHER; note = 2'-O-methyl modified nucleotide
  modified_base 11: mod_base = OTHER; note = 2'-O-methyl modified nucleotide
  modified_base 13: mod_base = OTHER; note = 2'-O-methyl modified nucleotide
  modified_base 18: mod_base = OTHER; note = 2'-O-methyl modified nucleotide
  modified_base 22: mod_base = OTHER; note = 2'-O-methyl modified nucleotide
  modified_base 25: mod_base = OTHER; note = 2'-O-methyl modified nucleotide
  modified_base 29: mod_base = OTHER; note = 2'-O-methyl modified nucleotide
  modified_base 30: mod_base = OTHER; note = 2'-O-methyl modified nucleotide
  modified_base 31: mod_base = OTHER; note = 2'-O-methyl modified nucleotide
  modified_base 32: mod_base = OTHER; note = 2'-O-methyl modified nucleotide
  modified_base 37: mod_base = OTHER; note = 2'-O-methyl modified nucleotide
  modified_base 38: mod_base = OTHER; note = 2'-O-methyl modified nucleotide
  modified_base 39: mod_base = OTHER; note = 2'-O-methyl modified nucleotide
  modified_base 40: mod_base = OTHER; note = 2'-O-methyl modified nucleotide
  modified_base 41: mod_base = OTHER; note = 2'-O-methyl modified nucleotide
  modified_base 42: mod_base = OTHER; note = 2'-O-methyl modified nucleotide
  modified_base 43: mod_base = OTHER; note = 2'-O-methyl modified nucleotide
  modified_base 47: mod_base = OTHER; note = 2'-O-methyl modified nucleotide
  modified_base 48: mod_base = OTHER; note = 2'-O-methyl modified nucleotide
  modified_base 51: mod_base = OTHER; note = 2'-O-methyl modified nucleotide
  modified_base 54: mod_base = OTHER; note = nucleotide with phosphorothioate linkage
  modified_base 58: mod_base = OTHER; note = 2'-O-methyl modified nucleotide
  modified_base 59: mod_base = OTHER; note = 2'-O-methyl modified nucleotide
  modified_base 61: mod_base = OTHER; note = 2'-O-methyl modified nucleotide
  modified_base 62: mod_base = OTHER; note = 2'-O-methyl modified nucleotide
  modified_base 63: mod_base = OTHER; note = 2'-O-methyl modified nucleotide
  modified_base 64: mod_base = OTHER; note = 2'-O-methyl modified nucleotide
  modified_base 65: mod_base = OTHER; note = 2'-O-methyl modified nucleotide
  modified_base 66: mod_base = OTHER; note = 2'-O-methyl modified nucleotide
  modified_base 67: mod_base = OTHER; note = 2'-O-methyl modified nucleotide
  modified_base 68: mod_base = OTHER; note = 2'-O-methyl modified nucleotide
  modified_base 69: mod_base = OTHER; note = 2'-O-methyl modified nucleotide
  modified_base 70: mod_base = OTHER; note = 2'-O-methyl modified nucleotide
  modified_base 75: mod_base = OTHER; note = 2'-O-methyl modified nucleotide
  modified_base 77: mod_base = OTHER; note = 2'-O-methyl modified nucleotide
  modified_base 80: mod_base = OTHER; note = 2'-O-methyl modified nucleotide
  modified_base 86: mod_base = OTHER; note = 2'-O-methyl modified nucleotide
  modified_base 87: mod_base = OTHER; note = 2'-O-methyl modified nucleotide
  modified_base 89: mod_base = OTHER; note = 2'-O-methyl modified nucleotide
  modified_base 90: mod_base = OTHER; note = 2'-O-methyl modified nucleotide
  modified_base 91: mod_base = OTHER; note = 2'-O-methyl modified nucleotide
  modified_base 92: mod_base = OTHER; note = 2'-O-methyl modified nucleotide
  modified_base 99: mod_base = OTHER; note = nucleotide with phosphorothioate linkage
  modified_base 100: mod_base = OTHER; note = 2'-O-methyl modified nucleotide with phosphorothioate linkage
  modified_base 101: mod_base = OTHER; note = 2'-O-methyl modified nucleotide

SEQ ID NO: 2613-3001 - skipped (389 entries)

SEQ ID NO: 3002 - RNA, 91 nt, synthetic construct
  source 1..91: mol_type = other RNA
  misc_difference 1: note = a, c, u, g, unknown or other
  misc_difference 2: note = a, c, u, g, unknown or other
  misc_difference 3: note = a, c, u, g, unknown or other
  misc_difference 4: note = a, c, u, g, unknown or other
  misc_difference 5: note = a, c, u, g, unknown or other
  misc_difference 6: note = a, c, u, g, unknown or other
  misc_difference 7: note = a, c, u, g, unknown or other
  misc_difference 8: note = a, c, u, g, unknown or other
  misc_difference 9: note = a, c, u, g, unknown or other
  misc_difference 10: note = a, c, u, g, unknown or other
  misc_difference 11: note = a, c, u, g, unknown or other
  misc_difference 12: note = a, c, u, g, unknown or other
  misc_difference 13: note = a, c, u, g, unknown or other
  misc_difference 14: note = a, c, u, g, unknown or other
  misc_difference 15: note = a, c, u, g, unknown or other
  misc_difference 16: note = a, c, u, g, unknown or other
  misc_difference 17: note = a, c, u, g, unknown or other
  misc_difference 18: note = a, c, u, g, unknown or other
  misc_difference 19: note = a, c, u, g, unknown or other
  misc_difference 20: note = a, c, u, g, unknown or other
nnnnnnnnnnnnnnnnnnnngttttagagctagaaatagcaagttaaaataaggctagtccgttatcacgaaagggcaccgagtcggtgct

SEQ ID NO: 3003 - RNA, 91 nt, synthetic construct; identical to SEQ ID NO: 3002
  source 1..91: mol_type = other RNA
  misc_difference 1: note = 2'-O-methyl modified adenosine, cytidine, guanosine, uridine, unknown or other nucleotide with phosphorothioate linkage
  misc_difference 2: note = 2'-O-methyl modified adenosine, cytidine, guanosine, uridine, unknown or other nucleotide with phosphorothioate linkage
  misc_difference 3: note = 2'-O-methyl modified adenosine, cytidine, guanosine, uridine, unknown or other nucleotide with phosphorothioate linkage
  misc_difference 4: note = a, c, u, g, unknown or other
  misc_difference 5: note = a, c, u, g, unknown or other
  misc_difference 6: note = a, c, u, g, unknown or other
  misc_difference 7: note = a, c, u, g, unknown or other
  misc_difference 8: note = a, c, u, g, unknown or other
  misc_difference 9: note = a, c, u, g, unknown or other
  misc_difference 10: note = a, c, u, g, unknown or other
  misc_difference 11: note = a, c, u, g, unknown or other
  misc_difference 12: note = a, c, u, g, unknown or other
  misc_difference 13: note = a, c, u, g, unknown or other
  misc_difference 14: note = a, c, u, g, unknown or other
  misc_difference 15: note = a, c, u, g, unknown or other
  misc_difference 16: note = a, c, u, g, unknown or other
  misc_difference 17: note = a, c, u, g, unknown or other
  misc_difference 18: note = a, c, u, g, unknown or other
  misc_difference 19: note = a, c, u, g, unknown or other
  misc_difference 20: note = a, c, u, g, unknown or other
  modified_base 29: mod_base = OTHER; note = 2'-O-methyl modified nucleotide
  modified_base 30: mod_base = OTHER; note = 2'-O-methyl modified nucleotide
  modified_base 31: mod_base = OTHER; note = 2'-O-methyl modified nucleotide
  modified_base 32: mod_base = OTHER; note = 2'-O-methyl modified nucleotide
  modified_base 33: mod_base = OTHER; note = 2'-O-methyl modified nucleotide
  modified_base 34: mod_base = OTHER; note = 2'-O-methyl modified nucleotide
  modified_base 35: mod_base = OTHER; note = 2'-O-methyl modified nucleotide
  modified_base 36: mod_base = OTHER; note = 2'-O-methyl modified nucleotide
  modified_base 37: mod_base = OTHER; note = 2'-O-methyl modified nucleotide
  modified_base 38: mod_base = OTHER; note = 2'-O-methyl modified nucleotide
  modified_base 39: mod_base = OTHER; note = 2'-O-methyl modified nucleotide
  modified_base 40: mod_base = OTHER; note = 2'-O-methyl modified nucleotide
  modified_base 88: mod_base = OTHER; note = 2'-O-methyl modified nucleotide
  modified_base 89: mod_base = OTHER; note = 2'-O-methyl modified nucleotide
  modified_base 90: mod_base = OTHER; note = 2'-O-methyl modified nucleotide with phosphorothioate linkage
  modified_base 91: mod_base = OTHER; note = 2'-O-methyl modified nucleotide

SEQ ID NO: 3004 - skipped

SEQ ID NO: 3005 - RNA, 887 nt, synthetic construct; identical to SEQ ID NO: 821
  source 1..887: mol_type = other RNA

SEQ ID NO: 3006 - RNA, 70 nt, synthetic construct
  source 1..70: mol_type = other RNA
gttttagagctagaaatagcaagttaaaataaggctagtccgttatcacgaaagggcaccgagtcggtgc

SEQ ID NO: 3007 - RNA, 70 nt, synthetic construct; identical to SEQ ID NO: 3006
  source 1..70: mol_type = other RNA
  modified_base 9: mod_base = OTHER; note = 2'-O-methyl modified nucleotide
  modified_base 10: mod_base = OTHER; note = 2'-O-methyl modified nucleotide
  modified_base 11: mod_base = OTHER; note = 2'-O-methyl modified nucleotide
  modified_base 12: mod_base = OTHER; note = 2'-O-methyl modified nucleotide
  modified_base 13: mod_base = OTHER; note = 2'-O-methyl modified nucleotide
  modified_base 14: mod_base = OTHER; note = 2'-O-methyl modified nucleotide
  modified_base 15: mod_base = OTHER; note = 2'-O-methyl modified nucleotide
  modified_base 16: mod_base = OTHER; note = 2'-O-methyl modified nucleotide
  modified_base 17: mod_base = OTHER; note = 2'-O-methyl modified nucleotide
  modified_base 18: mod_base = OTHER; note = 2'-O-methyl modified nucleotide
  modified_base 19: mod_base = OTHER; note = 2'-O-methyl modified nucleotide
  modified_base 20: mod_base = OTHER; note = 2'-O-methyl modified nucleotide
  modified_base 67: mod_base = OTHER; note = nucleotide with phosphorothioate linkage
  modified_base 68: mod_base = OTHER; note = 2'-O-methyl modified nucleotide with phosphorothioate linkage
  modified_base 69: mod_base = OTHER; note = 2'-O-methyl modified nucleotide with phosphorothioate linkage
  modified_base 70: mod_base = OTHER; note = 2'-O-methyl modified nucleotide

SEQ ID NO: 3008 - RNA, 70 nt, synthetic construct; identical to SEQ ID NO: 3006
  source 1..70: mol_type = other RNA
  modified_base 9: mod_base = OTHER; note = 2'-O-methyl modified nucleotide
  modified_base 10: mod_base = OTHER; note = 2'-O-methyl modified nucleotide
  modified_base 11: mod_base = OTHER; note = 2'-O-methyl modified nucleotide
  modified_base 12: mod_base = OTHER; note = 2'-O-methyl modified nucleotide
  modified_base 13: mod_base = OTHER; note = 2'-O-methyl modified nucleotide
  modified_base 14: mod_base = OTHER; note = 2'-O-methyl modified nucleotide
  modified_base 15: mod_base = OTHER; note = 2'-O-methyl modified nucleotide
  modified_base 16: mod_base = OTHER; note = 2'-O-methyl modified nucleotide
  modified_base 17: mod_base = OTHER; note = 2'-O-methyl modified nucleotide
  modified_base 18: mod_base = OTHER; note = 2'-O-methyl modified nucleotide
  modified_base 19: mod_base = OTHER; note = 2'-O-methyl modified nucleotide
  modified_base 20: mod_base = OTHER; note = 2'-O-methyl modified nucleotide
  modified_base 49: mod_base = OTHER; note = 2'-O-methyl modified nucleotide
  modified_base 50: mod_base = OTHER; note = 2'-O-methyl modified nucleotide
  modified_base 51: mod_base = OTHER; note = 2'-O-methyl modified nucleotide
  modified_base 52: mod_base = OTHER; note = 2'-O-methyl modified nucleotide
  modified_base 53: mod_base = OTHER; note = 2'-O-methyl modified nucleotide
  modified_base 54: mod_base = OTHER; note = 2'-O-methyl modified nucleotide
  modified_base 55: mod_base = OTHER; note = 2'-O-methyl modified nucleotide
  modified_base 56: mod_base = OTHER; note = 2'-O-methyl modified nucleotide
  modified_base 57: mod_base = OTHER; note = 2'-O-methyl modified nucleotide
  modified_base 58: mod_base = OTHER; note = 2'-O-methyl modified nucleotide
  modified_base 59: mod_base = OTHER; note = 2'-O-methyl modified nucleotide
  modified_base 60: mod_base = OTHER; note = 2'-O-methyl modified nucleotide
  modified_base 61: mod_base = OTHER; note = 2'-O-methyl modified nucleotide
  modified_base 62: mod_base = OTHER; note = 2'-O-methyl modified nucleotide
  modified_base 63: mod_base = OTHER; note = 2'-O-methyl modified nucleotide
  modified_base 64: mod_base = OTHER; note = 2'-O-methyl modified nucleotide
  modified_base 65: mod_base = OTHER; note = 2'-O-methyl modified nucleotide
  modified_base 66: mod_base = OTHER; note = 2'-O-methyl modified nucleotide
  modified_base 67: mod_base = OTHER; note = 2'-O-methyl modified nucleotide with phosphorothioate linkage
  modified_base 68: mod_base = OTHER; note = 2'-O-methyl modified nucleotide with phosphorothioate linkage
  modified_base 69: mod_base = OTHER; note = 2'-O-methyl modified nucleotide with phosphorothioate linkage
  modified_base 70: mod_base = OTHER; note = 2'-O-methyl modified nucleotide

SEQ ID NO: 3009 - RNA, 68 nt, synthetic construct; identical to SEQ ID NO: 604
  source 1..68: mol_type = other RNA
  modified_base 9: mod_base = OTHER; note = 2'-O-methyl modified nucleotide
  modified_base 10: mod_base = OTHER; note = 2'-O-methyl modified nucleotide
  modified_base 11: mod_base = OTHER; note = 2'-O-methyl modified nucleotide
  modified_base 12: mod_base = OTHER; note = 2'-O-methyl modified nucleotide
  modified_base 13: mod_base = OTHER; note = 2'-O-methyl modified nucleotide
  modified_base 14: mod_base = OTHER; note = 2'-O-methyl modified nucleotide
  modified_base 15: mod_base = OTHER; note = 2'-O-methyl modified nucleotide
  modified_base 16: mod_base = OTHER; note = 2'-O-methyl modified nucleotide
  modified_base 17: mod_base = OTHER; note = 2'-O-methyl modified nucleotide
  modified_base 18: mod_base = OTHER; note = 2'-O-methyl modified nucleotide
  modified_base 19: mod_base = OTHER; note = 2'-O-methyl modified nucleotide
  modified_base 20: mod_base = OTHER; note = 2'-O-methyl modified nucleotide
  modified_base 65: mod_base = OTHER; note = nucleotide with phosphorothioate linkage
  modified_base 66: mod_base = OTHER; note = 2'-O-methyl modified nucleotide with phosphorothioate linkage
  modified_base 67: mod_base = OTHER; note = 2'-O-methyl modified nucleotide with phosphorothioate linkage
  modified_base 68: mod_base = OTHER; note = 2'-O-methyl modified nucleotide

SEQ ID NO: 3010 - RNA, 68 nt, synthetic construct
  source 1..68: mol_type = other RNA
gttttagagctagaaatagcaagttaaaataaggctagtccgttatcaaaatggcaccgagtcggtgc

SEQ ID NO: 3011 - RNA, 68 nt, synthetic construct; identical to SEQ ID NO: 3010
  source 1..68: mol_type = other RNA
  modified_base 9: mod_base = OTHER; note = 2'-O-methyl modified nucleotide
  modified_base 10: mod_base = OTHER; note = 2'-O-methyl modified nucleotide
  modified_base 11: mod_base = OTHER; note = 2'-O-methyl modified nucleotide
  modified_base 12: mod_base = OTHER; note = 2'-O-methyl modified nucleotide
  modified_base 13: mod_base = OTHER; note = 2'-O-methyl modified nucleotide
  modified_base 14: mod_base = OTHER; note = 2'-O-methyl modified nucleotide
  modified_base 15: mod_base = OTHER; note = 2'-O-methyl modified nucleotide
  modified_base 16: mod_base = OTHER; note = 2'-O-methyl modified nucleotide
  modified_base 17: mod_base = OTHER; note = 2'-O-methyl modified nucleotide
  modified_base 18: mod_base = OTHER; note = 2'-O-methyl modified nucleotide
  modified_base 19: mod_base = OTHER; note = 2'-O-methyl modified nucleotide
  modified_base 20: mod_base = OTHER; note = 2'-O-methyl modified nucleotide
  modified_base 65: mod_base = OTHER; note = nucleotide with phosphorothioate linkage
  modified_base 66: mod_base = OTHER; note = 2'-O-methyl modified nucleotide with phosphorothioate linkage
  modified_base 67: mod_base = OTHER; note = 2'-O-methyl modified nucleotide with phosphorothioate linkage
  modified_base 68: mod_base = OTHER; note = 2'-O-methyl modified nucleotide

SEQ ID NO: 3012 - RNA, 68 nt, synthetic construct; identical to SEQ ID NO: 3010
  source 1..68: mol_type = other RNA
  modified_base 9: mod_base = OTHER; note = 2'-O-methyl modified nucleotide
  modified_base 10: mod_base = OTHER; note = 2'-O-methyl modified nucleotide
  modified_base 11: mod_base = OTHER; note = 2'-O-methyl modified nucleotide
  modified_base 12: mod_base = OTHER; note = 2'-O-methyl modified nucleotide
  modified_base 13: mod_base = OTHER; note = 2'-O-methyl modified nucleotide
  modified_base 14: mod_base = OTHER; note = 2'-O-methyl modified nucleotide
  modified_base 15: mod_base = OTHER; note = 2'-O-methyl modified nucleotide
  modified_base 16: mod_base = OTHER; note = 2'-O-methyl modified nucleotide
  modified_base 17: mod_base = OTHER; note = 2'-O-methyl modified nucleotide
  modified_base 18: mod_base = OTHER; note = 2'-O-methyl modified nucleotide
  modified_base 19: mod_base = OTHER; note = 2'-O-methyl modified nucleotide
  modified_base 20: mod_base = OTHER; note = 2'-O-methyl modified nucleotide
  modified_base 49: mod_base = OTHER; note = 2'-O-methyl modified nucleotide
  modified_base 50: mod_base = OTHER; note = 2'-O-methyl modified nucleotide
  modified_base 51: mod_base = OTHER; note = 2'-O-methyl modified nucleotide
  modified_base 52: mod_base = OTHER; note = 2'-O-methyl modified nucleotide
  modified_base 53: mod_base = OTHER; note = 2'-O-methyl modified nucleotide
  modified_base 54: mod_base = OTHER; note = 2'-O-methyl modified nucleotide
  modified_base 55: mod_base = OTHER; note = 2'-O-methyl modified nucleotide
  modified_base 56: mod_base = OTHER; note = 2'-O-methyl modified nucleotide
  modified_base 57: mod_base = OTHER; note = 2'-O-methyl modified nucleotide
  modified_base 58: mod_base = OTHER; note = 2'-O-methyl modified nucleotide
  modified_base 59: mod_base = OTHER; note = 2'-O-methyl modified nucleotide
  modified_base 60: mod_base = OTHER; note = 2'-O-methyl modified nucleotide
  modified_base 61: mod_base = OTHER; note = 2'-O-methyl modified nucleotide
  modified_base 62: mod_base = OTHER; note = 2'-O-methyl modified nucleotide
  modified_base 63: mod_base = OTHER; note = 2'-O-methyl modified nucleotide
  modified_base 64: mod_base = OTHER; note = 2'-O-methyl modified nucleotide
  modified_base 65: mod_base = OTHER; note = 2'-O-methyl modified nucleotide with phosphorothioate linkage
  modified_base 66: mod_base = OTHER; note = 2'-O-methyl modified nucleotide with phosphorothioate linkage
  modified_base 67: mod_base = OTHER; note = 2'-O-methyl modified nucleotide with phosphorothioate linkage
  modified_base 68: mod_base = OTHER; note = 2'-O-methyl modified nucleotide

SEQ ID NO: 3013 - RNA, 80 nt, synthetic construct; identical to SEQ ID NO: 602
  source 1..80: mol_type = other RNA
  modified_base 9: mod_base = OTHER; note = 2'-O-methyl modified nucleotide
  modified_base 10: mod_base = OTHER; note = 2'-O-methyl modified nucleotide
  modified_base 11: mod_base = OTHER; note = 2'-O-methyl modified nucleotide
  modified_base 12: mod_base = OTHER; note = 2'-O-methyl modified nucleotide
  modified_base 13: mod_base = OTHER; note = 2'-O-methyl modified nucleotide
  modified_base 14: mod_base = OTHER; note = 2'-O-methyl modified nucleotide
  modified_base 15: mod_base = OTHER; note = 2'-O-methyl modified nucleotide
  modified_base 16: mod_base = OTHER; note = 2'-O-methyl modified nucleotide
  modified_base 17: mod_base = OTHER; note = 2'-O-methyl modified nucleotide
  modified_base 18: mod_base = OTHER; note = 2'-O-methyl modified nucleotide
  modified_base 19: mod_base = OTHER; note = 2'-O-methyl modified nucleotide
  modified_base 20: mod_base = OTHER; note = 2'-O-methyl modified nucleotide
  modified_base 49: mod_base = OTHER; note = 2'-O-methyl modified nucleotide
  modified_base 50: mod_base = OTHER; note = 2'-O-methyl modified nucleotide
  modified_base 51: mod_base = OTHER; note = 2'-O-methyl modified nucleotide
  modified_base 52: mod_base = OTHER; note = 2'-O-methyl modified nucleotide
  modified_base 53: mod_base = OTHER; note = 2'-O-methyl modified nucleotide
  modified_base 54: mod_base = OTHER; note = 2'-O-methyl modified nucleotide
  modified_base 55: mod_base = OTHER; note = 2'-O-methyl modified nucleotide
  modified_base 56: mod_base = OTHER; note = 2'-O-methyl modified nucleotide
  modified_base 57: mod_base = OTHER; note = 2'-O-methyl modified nucleotide
  modified_base 58: mod_base = OTHER; note = 2'-O-methyl modified nucleotide
  modified_base 59: mod_base = OTHER; note = 2'-O-methyl modified nucleotide
  modified_base 60: mod_base = OTHER; note = 2'-O-methyl modified nucleotide
  modified_base 61: mod_base = OTHER; note = 2'-O-methyl modified nucleotide
  modified_base 62: mod_base = OTHER; note = 2'-O-methyl modified nucleotide
  modified_base 63: mod_base = OTHER; note = 2'-O-methyl modified nucleotide
  modified_base 64: mod_base = OTHER; note = 2'-O-methyl modified nucleotide
  modified_base 65: mod_base = OTHER; note = 2'-O-methyl modified nucleotide
  modified_base 66: mod_base = OTHER; note = 2'-O-methyl modified nucleotide
  modified_base 67: mod_base = OTHER; note = 2'-O-methyl modified nucleotide
  modified_base 68: mod_base = OTHER; note = 2'-O-methyl modified nucleotide
  modified_base 69: mod_base = OTHER; note = 2'-O-methyl modified nucleotide
  modified_base 70: mod_base = OTHER; note = 2'-O-methyl modified nucleotide
  modified_base 71: mod_base = OTHER; note = 2'-O-methyl modified nucleotide
  modified_base 72: mod_base = OTHER; note = 2'-O-methyl modified nucleotide
  modified_base 73: mod_base = OTHER; note = 2'-O-methyl modified nucleotide
  modified_base 74: mod_base = OTHER; note = 2'-O-methyl modified nucleotide
  modified_base 75: mod_base = OTHER; note = 2'-O-methyl modified nucleotide
  modified_base 76: mod_base = OTHER; note = 2'-O-methyl modified nucleotide
  modified_base 77: mod_base = OTHER; note = 2'-O-methyl modified nucleotide with phosphorothioate linkage
  modified_base 78: mod_base = OTHER; note = 2'-O-methyl modified nucleotide with phosphorothioate linkage
  modified_base 79: mod_base = OTHER; note = 2'-O-methyl modified nucleotide with phosphorothioate linkage
  modified_base 80: mod_base = OTHER; note = 2'-O-methyl modified nucleotide

SEQ ID NO: 3014 - RNA, 100 nt, synthetic construct
  source 1..100: mol_type = other RNA
  misc_difference 1: note = 2'-O-methyl modified adenosine, cytidine, guanosine, uridine, unknown or other nucleotide with phosphorothioate linkage
  misc_difference 2: note = 2'-O-methyl modified adenosine, cytidine, guanosine, uridine, unknown or other nucleotide with phosphorothioate linkage
  misc_difference 3: note = 2'-O-methyl modified adenosine, cytidine, guanosine, uridine, unknown or other nucleotide with phosphorothioate linkage
  misc_difference 4: note = a, c, u, g, unknown or other
  misc_difference 5: note = a, c, u, g, unknown or other
  misc_difference 6: note = a, c, u, g, unknown or other
  misc_difference 7: note = a, c, u, g, unknown or other
  misc_difference 8: note = a, c, u, g, unknown or other
  misc_difference 9: note = a, c, u, g, unknown or other
  misc_difference 10: note = a, c, u, g, unknown or other
  misc_difference 11: note = a, c, u, g, unknown or other
  misc_difference 12: note = a, c, u, g, unknown or other
  misc_difference 13: note = a, c, u, g, unknown or other
  misc_difference 14: note = a, c, u, g, unknown or other
  misc_difference 15: note = a, c, u, g, unknown or other
  misc_difference 16: note = a, c, u, g, unknown or other
  misc_difference 17: note = a, c, u, g, unknown or other
  misc_difference 18: note = a, c, u, g, unknown or other
  misc_difference 19: note = a, c, u, g, unknown or other
  misc_difference 20: note = a, c, u, g, unknown or other
  modified_base 29: mod_base = OTHER; note = 2'-O-methyl modified nucleotide
  modified_base 30: mod_base = OTHER; note = 2'-O-methyl modified nucleotide
  modified_base 31: mod_base = OTHER; note = 2'-O-methyl modified nucleotide
  modified_base 32: mod_base = OTHER; note = 2'-O-methyl modified nucleotide
  modified_base 33: mod_base = OTHER; note = 2'-O-methyl modified nucleotide
  modified_base 34: mod_base = OTHER; note = 2'-O-methyl modified nucleotide
  modified_base 35: mod_base = OTHER; note = 2'-O-methyl modified nucleotide
  modified_base 36: mod_base = OTHER; note = 2'-O-methyl modified nucleotide
  modified_base 37: mod_base = OTHER; note = 2'-O-methyl modified nucleotide
  modified_base 38: mod_base = OTHER; note = 2'-O-methyl modified nucleotide
  modified_base 39: mod_base = OTHER; note = 2'-O-methyl modified nucleotide
  modified_base 40: mod_base = OTHER; note = 2'-O-methyl modified nucleotide
  modified_base 69: mod_base = OTHER; note = 2'-O-methyl modified nucleotide
  modified_base 70: mod_base = OTHER; note = 2'-O-methyl modified nucleotide
  modified_base 71: mod_base = OTHER; note = 2'-O-methyl modified nucleotide
  modified_base 72: mod_base = OTHER; note = 2'-O-methyl modified nucleotide
  modified_base 73: mod_base = OTHER; note = 2'-O-methyl modified nucleotide
  modified_base 74: mod_base = OTHER; note = 2'-O-methyl modified nucleotide
  modified_base 75: mod_base = OTHER; note = 2'-O-methyl modified nucleotide
  modified_base 76: mod_base = OTHER; note = 2'-O-methyl modified nucleotide
  modified_base 77: mod_base = OTHER; note = 2'-O-methyl modified nucleotide
  modified_base 78: mod_base = OTHER; note = 2'-O-methyl modified nucleotide
  modified_base 79: mod_base = OTHER; note = 2'-O-methyl modified nucleotide
  modified_base 80: mod_base = OTHER; note = 2'-O-methyl modified nucleotide
  modified_base 81: mod_base = OTHER; note = 2'-O-methyl modified nucleotide
  modified_base 82: mod_base = OTHER; note = 2'-O-methyl modified nucleotide
  modified_base 83: mod_base = OTHER; note = 2'-O-methyl modified nucleotide
  modified_base 84: mod_base = OTHER; note = 2'-O-methyl modified nucleotide
  modified_base 85: mod_base = OTHER; note = 2'-O-methyl modified nucleotide
  modified_base 86: mod_base = OTHER; note = 2'-O-methyl modified nucleotide
  modified_base 87: mod_base = OTHER; note = 2'-O-methyl modified nucleotide
  modified_base 88: mod_base = OTHER; note = 2'-O-methyl modified nucleotide
  modified_base 89: mod_base = OTHER; note = 2'-O-methyl modified nucleotide
  modified_base 90: mod_base = OTHER; note = 2'-O-methyl modified nucleotide
  modified_base 91: mod_base = OTHER; note = 2'-O-methyl modified nucleotide
  modified_base 92: mod_base = OTHER; note = 2'-O-methyl modified nucleotide
  modified_base 93: mod_base = OTHER; note = 2'-O-methyl modified nucleotide
  modified_base 94: mod_base = OTHER; note = 2'-O-methyl modified nucleotide
  modified_base 95: mod_base = OTHER; note = 2'-O-methyl modified nucleotide
  modified_base 96: mod_base = OTHER; note = 2'-O-methyl modified nucleotide
  modified_base 97: mod_base = OTHER; note = 2'-O-methyl modified nucleotide with phosphorothioate linkage
  modified_base 98: mod_base = OTHER; note = 2'-O-methyl modified nucleotide with phosphorothioate linkage
  modified_base 99: mod_base = OTHER; note = 2'-O-methyl modified nucleotide with phosphorothioate linkage
  modified_base 100: mod_base = OTHER; note = 2'-O-methyl modified nucleotide
nnnnnnnnnnnnnnnnnnnngttttagagctagaaatagcaagttaaaataaggctagtccgttatcaacttgaaaaagtggcaccgagtcggtgctttt

SEQ ID NO: 3015-3018 - skipped (4 entries)

SEQ ID NO: 3019 - RNA, 91 nt, synthetic construct
  source 1..91: mol_type = other RNA
  modified_base 1: mod_base = OTHER; note = 2'-O-methyl modified nucleotide with phosphorothioate linkage
  modified_base 2: mod_base = OTHER; note = 2'-O-methyl modified nucleotide with phosphorothioate linkage
  modified_base 3: mod_base = OTHER; note = 2'-O-methyl modified nucleotide with phosphorothioate linkage
  modified_base 29: mod_base = OTHER; note = 2'-O-methyl modified nucleotide
  modified_base 30: mod_base = OTHER; note = 2'-O-methyl modified nucleotide
  modified_base 31: mod_base = OTHER; note = 2'-O-methyl modified nucleotide
  modified_base 32: mod_base = OTHER; note = 2'-O-methyl modified nucleotide
  modified_base 33: mod_base = OTHER; note = 2'-O-methyl modified nucleotide
  modified_base 34: mod_base = OTHER; note = 2'-O-methyl modified nucleotide
  modified_base 35: mod_base = OTHER; note = 2'-O-methyl modified nucleotide
  modified_base 36: mod_base = OTHER; note = 2'-O-methyl modified nucleotide
  modified_base 37: mod_base = OTHER; note = 2'-O-methyl modified nucleotide
  modified_base 38: mod_base = OTHER; note = 2'-O-methyl modified nucleotide
  modified_base 39: mod_base = OTHER; note = 2'-O-methyl modified nucleotide
  modified_base 40: mod_base = OTHER; note = 2'-O-methyl modified nucleotide
  modified_base 88: mod_base = OTHER; note = 2'-O-methyl modified nucleotide with phosphorothioate linkage
  modified_base 89: mod_base = OTHER; note = 2'-O-methyl modified nucleotide with phosphorothioate linkage
  modified_base 90: mod_base = OTHER; note = 2'-O-methyl modified nucleotide with phosphorothioate linkage
  modified_base 91: mod_base = OTHER; note = 2'-O-methyl modified nucleotide
ctctcagctggtacacggcagttttagagctagaaatagcaagttaaaataaggctagtccgttatcacgaaagggcaccgagtcggtgct

SEQ ID NO: 3020-3099 - skipped (80 entries)

SEQ ID NO: 3100 - RNA, 100 nt, synthetic construct; identical to SEQ ID NO: 993
  source 1..100: mol_type = other RNA

SEQ ID NO: 3101 - RNA, 101 nt, synthetic construct; identical to SEQ ID NO: 994
  source 1..101: mol_type = other RNA

SEQ ID NO: 3102 - RNA, 101 nt, synthetic construct; identical to SEQ ID NO: 995
  source 1..101: mol_type = other RNA

SEQ ID NO: 3103 - RNA, 101 nt, synthetic construct; identical to SEQ ID NO: 996
  source 1..101: mol_type = other RNA

SEQ ID NO: 3104 - RNA, 100 nt, synthetic construct; identical to SEQ ID NO: 993
  source 1..100: mol_type = other RNA

SEQ ID NO: 3105 - RNA, 100 nt, synthetic construct; identical to SEQ ID NO: 998
  source 1..100: mol_type = other RNA

SEQ ID NO: 3106 - RNA, 100 nt, synthetic construct; identical to SEQ ID NO: 999
  source 1..100: mol_type = other RNA

SEQ ID NO: 3107 - RNA, 20 nt, synthetic construct
  source 1..20: mol_type = other RNA
gagtccgagcagaagaagaa

SEQ ID NO: 3108 - RNA, 20 nt, synthetic construct
  source 1..20: mol_type = other RNA
gaccccctccaccccgcctc

SEQ ID NO: 3109 - RNA, 20 nt, synthetic construct
  source 1..20: mol_type = other RNA
gacttgttttcattgttctc

SEQ ID NO: 3110 - RNA, 20 nt, synthetic construct
  source 1..20: mol_type = other RNA
cccccggacggttcaagcaa

SEQ ID NO: 3111 - RNA, 101 nt, synthetic construct; identical to SEQ ID NO: 1576
  source 1..101: mol_type = other RNA
  modified_base 1: mod_base = OTHER; note = 2'-O-methyl modified nucleotide with phosphorothioate linkage
  modified_base 2: mod_base = OTHER; note = 2'-O-methyl modified nucleotide with phosphorothioate linkage
  modified_base 3: mod_base = OTHER; note = 2'-O-methyl modified nucleotide with phosphorothioate linkage
  modified_base 4: mod_base = OTHER; note = 2'-O-methyl modified nucleotide
  modified_base 5: mod_base = OTHER; note = 2'-O-methyl modified nucleotide
  modified_base 8: mod_base = OTHER; note = 2'-O-methyl modified nucleotide
  modified_base 9: mod_base = OTHER; note = 2'-O-methyl modified nucleotide
  modified_base 11: mod_base = OTHER; note = 2'-O-methyl modified nucleotide
  modified_base 13: mod_base = OTHER; note = 2'-O-methyl modified nucleotide
  modified_base 18: mod_base = OTHER; note = 2'-O-methyl modified nucleotide
  modified_base 22: mod_base = OTHER; note = 2'-O-methyl modified nucleotide
  modified_base 25: mod_base = OTHER; note = 2'-O-methyl modified nucleotide
  modified_base 29: mod_base = OTHER; note = 2'-O-methyl modified nucleotide
  modified_base 30: mod_base = OTHER; note = 2'-O-methyl modified nucleotide
  modified_base 31: mod_base = OTHER; note = 2'-O-methyl modified nucleotide
  modified_base 32: mod_base = OTHER; note = 2'-O-methyl modified nucleotide
  modified_base 37: mod_base = OTHER; note = 2'-O-methyl modified nucleotide
  modified_base 38: mod_base = OTHER; note = 2'-O-methyl modified nucleotide
  modified_base 39: mod_base = OTHER; note = 2'-O-methyl modified nucleotide
  modified_base 40: mod_base = OTHER; note = 2'-O-methyl modified nucleotide
  modified_base 41: mod_base = OTHER; note = 2'-O-methyl modified nucleotide
  modified_base 42: mod_base = OTHER; note = 2'-O-methyl modified nucleotide
  modified_base 43: mod_base = OTHER; note = 2'-O-methyl modified nucleotide
  modified_base 47: mod_base = OTHER; note = 2'-O-methyl modified nucleotide
  modified_base 48: mod_base = OTHER; note = 2'-O-methyl modified nucleotide
  modified_base 51: mod_base = OTHER; note = 2'-O-methyl modified nucleotide
  modified_base 58: mod_base = OTHER; note = 2'-O-methyl modified nucleotide
  modified_base 59: mod_base = OTHER; note = 2'-O-methyl modified nucleotide
  modified_base 61: mod_base = OTHER; note = 2'-O-methyl modified nucleotide
  modified_base 62: mod_base = OTHER; note = 2'-O-methyl modified nucleotide
  modified_base 63: mod_base = OTHER; note = 2'-O-methyl modified nucleotide
  modified_base 64: mod_base = OTHER; note = 2'-O-methyl modified nucleotide
  modified_base 65: mod_base = OTHER; note = 2'-O-methyl modified nucleotide
  modified_base 66: mod_base = OTHER; note = 2'-O-methyl modified nucleotide
  modified_base 67: mod_base = OTHER; note = 2'-O-methyl modified nucleotide
  modified_base 68: mod_base = OTHER; note = 2'-O-methyl modified nucleotide
  modified_base 69: mod_base = OTHER; note = 2'-O-methyl modified nucleotide
  modified_base 70: mod_base = OTHER; note = 2'-O-methyl modified nucleotide
  modified_base 75: mod_base = OTHER; note = 2'-O-methyl modified nucleotide
  modified_base 77: mod_base = OTHER; note = 2'-O-methyl modified nucleotide
  modified_base 80: mod_base = OTHER; note = 2'-O-methyl modified nucleotide
  modified_base 86: mod_base = OTHER; note = 2'-O-methyl modified nucleotide
  modified_base 87: mod_base = OTHER; note = 2'-O-methyl modified nucleotide
  modified_base 89: mod_base = OTHER; note = 2'-O-methyl modified nucleotide
  modified_base 90: mod_base = OTHER; note = 2'-O-methyl modified nucleotide
  modified_base 91: mod_base = OTHER; note = 2'-O-methyl modified nucleotide
  modified_base 92: mod_base = OTHER; note = 2'-O-methyl modified nucleotide
  modified_base 99: mod_base = OTHER; note = nucleotide with phosphorothioate linkage
  modified_base 100: mod_base = OTHER; note = 2'-O-methyl modified nucleotide with phosphorothioate linkage
  modified_base 101: mod_base = OTHER; note = 2'-O-methyl modified nucleotide

SEQ ID NO: 3112 - RNA, 101 nt, synthetic construct; identical to SEQ ID NO: 1571
  source 1..101: mol_type = other RNA
  modified_base 1: mod_base = OTHER; note = 2'-O-methyl modified nucleotide with phosphorothioate linkage
  modified_base 2: mod_base = OTHER; note = 2'-O-methyl modified nucleotide with phosphorothioate linkage
  modified_base 3: mod_base = OTHER; note = 2'-O-methyl modified nucleotide with phosphorothioate linkage
  modified_base 4: mod_base = OTHER; note = 2'-O-methyl modified nucleotide
  modified_base 5: mod_base = OTHER; note = 2'-O-methyl modified nucleotide
  modified_base 8: mod_base = OTHER; note = 2'-O-methyl modified nucleotide
  modified_base 9: mod_base = OTHER; note = 2'-O-methyl modified nucleotide
  modified_base 11: mod_base = OTHER; note = 2'-O-methyl modified nucleotide
  modified_base 13: mod_base = OTHER; note = 2'-O-methyl modified nucleotide
  modified_base 18: mod_base = OTHER; note = 2'-O-methyl modified nucleotide
  modified_base 22: mod_base = OTHER; note = 2'-O-methyl modified nucleotide
  modified_base 25: mod_base = OTHER; note = 2'-O-methyl modified nucleotide
  modified_base 29: mod_base = OTHER; note = 2'-O-methyl modified nucleotide
  modified_base 30: mod_base = OTHER; note = 2'-O-methyl modified nucleotide
  modified_base 31: mod_base = OTHER; note = 2'-O-methyl modified nucleotide
  modified_base 32: mod_base = OTHER; note = 2'-O-methyl modified nucleotide
  modified_base 37: mod_base = OTHER; note = 2'-O-methyl modified nucleotide
  modified_base 38: mod_base = OTHER; note = 2'-O-methyl modified nucleotide
  modified_base 39: mod_base = OTHER; note = 2'-O-methyl modified nucleotide
  modified_base 40: mod_base = OTHER; note = 2'-O-methyl modified nucleotide
  modified_base 41: mod_base = OTHER; note = 2'-O-methyl modified nucleotide
  modified_base 42: mod_base = OTHER; note = 2'-O-methyl modified nucleotide
  modified_base 43: mod_base = OTHER; note = 2'-O-methyl modified nucleotide
  modified_base 47: mod_base = OTHER; note = 2'-O-methyl modified nucleotide
  modified_base 48: mod_base = OTHER; note = 2'-O-methyl modified nucleotide
  modified_base 51: mod_base = OTHER; note = 2'-O-methyl modified nucleotide
  modified_base 58: mod_base = OTHER; note = 2'-O-methyl modified nucleotide
  modified_base 59: mod_base = OTHER; note = 2'-O-methyl modified nucleotide
  modified_base 61: mod_base = OTHER; note = 2'-O-methyl modified nucleotide
  modified_base 62: mod_base = OTHER; note = 2'-O-methyl modified nucleotide
  modified_base 63: mod_base = OTHER; note = 2'-O-methyl modified nucleotide
  modified_base 64: mod_base = OTHER; note = 2'-O-methyl modified nucleotide
  modified_base 65: mod_base = OTHER; note = 2'-O-methyl modified nucleotide
  modified_base 66: mod_base = OTHER; note = 2'-O-methyl modified nucleotide
  modified_base 67: mod_base = OTHER; note = 2'-O-methyl modified nucleotide
  modified_base 68: mod_base = OTHER; note = 2'-O-methyl modified nucleotide
  modified_base 69: mod_base = OTHER; note = 2'-O-methyl modified nucleotide
  modified_base 70: mod_base = OTHER; note = 2'-O-methyl modified nucleotide
  modified_base 75: mod_base = OTHER; note = 2'-O-methyl modified nucleotide
  modified_base 77: mod_base = OTHER; note = 2'-O-methyl modified nucleotide
  modified_base 80: mod_base = OTHER; note = 2'-O-methyl modified nucleotide
  modified_base 86: mod_base = OTHER; note = 2'-O-methyl modified nucleotide
  modified_base 87: mod_base = OTHER; note = 2'-O-methyl modified nucleotide
  modified_base 89: mod_base = OTHER; note = 2'-O-methyl modified nucleotide
  modified_base 90: mod_base = OTHER; note = 2'-O-methyl modified nucleotide
  modified_base 91: mod_base = OTHER; note = 2'-O-methyl modified nucleotide
  modified_base 92: mod_base = OTHER; note = 2'-O-methyl modified nucleotide
  modified_base 99: mod_base = OTHER; note = nucleotide with phosphorothioate linkage
  modified_base 100: mod_base = OTHER; note = 2'-O-methyl modified nucleotide with phosphorothioate linkage
  modified_base 101: mod_base = OTHER; note = 2'-O-methyl modified nucleotide

SEQ ID NO: 3113 - RNA, 101 nt, synthetic construct; identical to SEQ ID NO: 1605
  source 1..101: mol_type = other RNA
  modified_base 1: mod_base = OTHER; note = 2'-O-methyl modified nucleotide with phosphorothioate linkage
  modified_base 2: mod_base = OTHER; note = 2'-O-methyl modified nucleotide with phosphorothioate linkage
  modified_base 3: mod_base = OTHER; note = 2'-O-methyl modified nucleotide with phosphorothioate linkage
  modified_base 4: mod_base = OTHER; note = 2'-O-methyl modified nucleotide
  modified_base 5: mod_base = OTHER; note = 2'-O-methyl modified nucleotide
  modified_base 8: mod_base = OTHER; note = 2'-O-methyl modified nucleotide
  modified_base 9: mod_base = OTHER; note = 2'-O-methyl modified nucleotide
  modified_base 11: mod_base = OTHER; note = 2'-O-methyl modified nucleotide
  modified_base 13: mod_base = OTHER; note = 2'-O-methyl modified nucleotide
  modified_base 18: mod_base = OTHER; note = 2'-O-methyl modified nucleotide
  modified_base 22: mod_base = OTHER; note = 2'-O-methyl modified nucleotide
  modified_base 25: mod_base = OTHER; note = 2'-O-methyl modified nucleotide
  modified_base 29: mod_base = OTHER; note = 2'-O-methyl modified nucleotide
  modified_base 30: mod_base = OTHER; note = 2'-O-methyl modified nucleotide
  modified_base 31: mod_base = OTHER; note = 2'-O-methyl modified nucleotide
  modified_base 32: mod_base = OTHER; note = 2'-O-methyl modified nucleotide
  modified_base 37: mod_base = OTHER; note = 2'-O-methyl modified nucleotide
  modified_base 38: mod_base = OTHER; note = 2'-O-methyl modified nucleotide
  modified_base 39: mod_base = OTHER; note = 2'-O-methyl modified nucleotide
  modified_base 40: mod_base = OTHER; note = 2'-O-methyl modified nucleotide
  modified_base 41: mod_base = OTHER; note = 2'-O-methyl modified nucleotide
  modified_base 42: mod_base = OTHER; note = 2'-O-methyl modified nucleotide
  modified_base 43: mod_base = OTHER; note = 2'-O-methyl modified nucleotide
  modified_base 47: mod_base = OTHER; note = 2'-O-methyl modified nucleotide
  modified_base 48: mod_base = OTHER; note = 2'-O-methyl modified nucleotide
  modified_base 51: mod_base = OTHER; note = 2'-O-methyl modified nucleotide
  modified_base 58: mod_base = OTHER; note = 2'-O-methyl modified nucleotide
  modified_base 59: mod_base = OTHER; note = 2'-O-methyl modified nucleotide
  modified_base 61: mod_base = OTHER; note = 2'-O-methyl modified nucleotide
  modified_base 62: mod_base = OTHER; note = 2'-O-methyl modified nucleotide
  modified_base 63: mod_base = OTHER; note = 2'-O-methyl modified nucleotide
  modified_base 64: mod_base = OTHER; note = 2'-O-methyl modified nucleotide
  modified_base 65: mod_base = OTHER; note = 2'-O-methyl modified nucleotide
  modified_base 66: mod_base = OTHER; note = 2'-O-methyl modified nucleotide
  modified_base 67: mod_base = OTHER; note = 2'-O-methyl modified nucleotide
  modified_base 68: mod_base = OTHER; note = 2'-O-methyl modified nucleotide
  modified_base 69: mod_base = OTHER; note = 2'-O-methyl modified nucleotide
  modified_base 70: mod_base = OTHER; note = 2'-O-methyl modified nucleotide
  modified_base 75: mod_base = OTHER; note = 2'-O-methyl modified nucleotide
  modified_base 77: mod_base = OTHER; note = 2'-O-methyl modified nucleotide
  modified_base 80: mod_base = OTHER; note = 2'-O-methyl modified nucleotide
  modified_base 86: mod_base = OTHER; note = 2'-O-methyl modified nucleotide
  modified_base 87: mod_base = OTHER; note = 2'-O-methyl modified nucleotide
  modified_base 89: mod_base = OTHER; note = 2'-O-methyl modified nucleotide
  modified_base 90: mod_base = OTHER; note = 2'-O-methyl modified nucleotide
  modified_base 91: mod_base = OTHER; note = 2'-O-methyl modified nucleotide
  modified_base 92: mod_base = OTHER; note = 2'-O-methyl modified nucleotide
  modified_base 99: mod_base = OTHER; note = nucleotide with phosphorothioate linkage
  modified_base 100: mod_base = OTHER; note = 2'-O-methyl modified nucleotide with phosphorothioate linkage
  modified_base 101: mod_base = OTHER; note = 2'-O-methyl modified nucleotide

SEQ ID NO: 3114 - RNA, 101 nt, synthetic construct; identical to SEQ ID NO: 1606
  source 1..101: mol_type = other RNA
  modified_base 1: mod_base = OTHER; note = 2'-O-methyl modified nucleotide with phosphorothioate linkage
  modified_base 2: mod_base = OTHER; note = 2'-O-methyl modified nucleotide with phosphorothioate linkage
  modified_base 3: mod_base = OTHER; note = 2'-O-methyl modified nucleotide with phosphorothioate linkage
  modified_base 4: mod_base = OTHER; note = 2'-O-methyl modified nucleotide
  modified_base 5: mod_base = OTHER; note = 2'-O-methyl modified nucleotide
  modified_base 8: mod_base = OTHER; note = 2'-O-methyl modified nucleotide
  modified_base 9: mod_base = OTHER; note = 2'-O-methyl modified nucleotide
  modified_base 11: mod_base = OTHER; note = 2'-O-methyl modified nucleotide
  modified_base 13: mod_base = OTHER; note = 2'-O-methyl modified nucleotide
  modified_base 18: mod_base = OTHER; note = 2'-O-methyl modified nucleotide
  modified_base 22: mod_base = OTHER; note = 2'-O-methyl modified nucleotide
  modified_base 25: mod_base = OTHER; note = 2'-O-methyl modified nucleotide
  modified_base 29: mod_base = OTHER; note = 2'-O-methyl modified nucleotide
  modified_base 30: mod_base = OTHER; note = 2'-O-methyl modified nucleotide
  modified_base 31: mod_base = OTHER; note = 2'-O-methyl modified nucleotide
  modified_base 32: mod_base = OTHER; note = 2'-O-methyl modified nucleotide
  modified_base 37: mod_base = OTHER; note = 2'-O-methyl modified nucleotide
  modified_base 38: mod_base = OTHER; note = 2'-O-methyl modified nucleotide
  modified_base 39: mod_base = OTHER; note = 2'-O-methyl modified nucleotide
  modified_base 40: mod_base = OTHER; note = 2'-O-methyl modified nucleotide
  modified_base 41: mod_base = OTHER; note = 2'-O-methyl modified nucleotide
  modified_base 42: mod_base = OTHER; note = 2'-O-methyl modified nucleotide
  modified_base 43: mod_base = OTHER; note = 2'-O-methyl modified nucleotide
  modified_base 47: mod_base = OTHER; note = 2'-O-methyl modified nucleotide
  modified_base 48: mod_base = OTHER; note = 2'-O-methyl modified nucleotide
  modified_base 51: mod_base = OTHER; note = 2'-O-methyl modified nucleotide
  modified_base 58: mod_base = OTHER; note = 2'-O-methyl modified nucleotide
  modified_base 59: mod_base = OTHER; note = 2'-O-methyl modified nucleotide
  modified_base 61: mod_base = OTHER; note = 2'-O-methyl modified nucleotide
  modified_base 62: mod_base = OTHER; note = 2'-O-methyl modified nucleotide
  modified_base 63: mod_base = OTHER; note = 2'-O-methyl modified nucleotide
  modified_base 64: mod_base = OTHER; note = 2'-O-methyl modified nucleotide
  modified_base 65: mod_base = OTHER; note = 2'-O-methyl modified nucleotide
  modified_base 66: mod_base = OTHER; note = 2'-O-methyl modified nucleotide
  modified_base 67: mod_base = OTHER; note = 2'-O-methyl modified nucleotide
  modified_base 68: mod_base = OTHER; note = 2'-O-methyl modified nucleotide
  modified_base 69: mod_base = OTHER; note = 2'-O-methyl modified nucleotide
  modified_base 70: mod_base = OTHER; note = 2'-O-methyl modified nucleotide
  modified_base 75: mod_base = OTHER; note = 2'-O-methyl modified nucleotide
  modified_base 77: mod_base = OTHER; note = 2'-O-methyl modified nucleotide
  modified_base 80: mod_base = OTHER; note = 2'-O-methyl modified nucleotide
  modified_base 86: mod_base = OTHER; note = 2'-O-methyl modified nucleotide
  modified_base 87: mod_base = OTHER; note = 2'-O-methyl modified nucleotide
  modified_base 89: mod_base = OTHER; note = 2'-O-methyl modified nucleotide
  modified_base 90: mod_base = OTHER; note = 2'-O-methyl modified nucleotide
  modified_base 91: mod_base = OTHER; note = 2'-O-methyl modified nucleotide
  modified_base 92: mod_base = OTHER; note = 2'-O-methyl modified nucleotide
  modified_base 99: mod_base = OTHER; note = nucleotide with phosphorothioate linkage
  modified_base 100: mod_base = OTHER; note = 2'-O-methyl modified nucleotide with phosphorothioate linkage
  modified_base 101: mod_base = OTHER; note = 2'-O-methyl modified nucleotide

SEQ ID NO: 3115 - RNA, 101 nt, synthetic construct; identical to SEQ ID NO: 1607
  source 1..101: mol_type = other RNA
  modified_base 1: mod_base = OTHER; note = 2'-O-methyl modified nucleotide with phosphorothioate linkage
  modified_base 2: mod_base = OTHER; note = 2'-O-methyl modified nucleotide with phosphorothioate linkage
  modified_base 3: mod_base = OTHER; note = 2'-O-methyl modified nucleotide with phosphorothioate linkage
  modified_base 4: mod_base = OTHER; note = 2'-O-methyl modified nucleotide
  modified_base 5: mod_base = OTHER; note = 2'-O-methyl modified nucleotide
  modified_base 8: mod_base = OTHER; note = 2'-O-methyl modified nucleotide
  modified_base 9: mod_base = OTHER; note = 2'-O-methyl modified nucleotide
  modified_base 11: mod_base = OTHER; note = 2'-O-methyl modified nucleotide
  modified_base 13: mod_base = OTHER; note = 2'-O-methyl modified nucleotide
  modified_base 18: mod_base = OTHER; note = 2'-O-methyl modified nucleotide
  modified_base 22: mod_base = OTHER; note = 2'-O-methyl modified nucleotide
  modified_base 25: mod_base = OTHER; note = 2'-O-methyl modified nucleotide
  modified_base 29: mod_base = OTHER; note = 2'-O-methyl modified nucleotide
  modified_base 30: mod_base = OTHER; note = 2'-O-methyl modified nucleotide
  modified_base 31: mod_base = OTHER; note = 2'-O-methyl modified nucleotide
  modified_base 32: mod_base = OTHER; note = 2'-O-methyl modified nucleotide
  modified_base 37: mod_base = OTHER; note = 2'-O-methyl modified nucleotide
  modified_base 38: mod_base = OTHER; note = 2'-O-methyl modified nucleotide
  modified_base 39: mod_base = OTHER; note = 2'-O-methyl modified nucleotide
  modified_base 40: mod_base = OTHER; note = 2'-O-methyl modified nucleotide
  modified_base 41: mod_base = OTHER; note = 2'-O-methyl modified nucleotide
  modified_base 42: mod_base = OTHER; note = 2'-O-methyl modified nucleotide
  modified_base 43: mod_base = OTHER; note = 2'-O-methyl modified nucleotide
  modified_base 47: mod_base = OTHER; note = 2'-O-methyl modified nucleotide
  modified_base 48: mod_base = OTHER; note = 2'-O-methyl modified nucleotide
  modified_base 51: mod_base = OTHER; note = 2'-O-methyl modified nucleotide
  modified_base 58: mod_base = OTHER; note = 2'-O-methyl modified nucleotide
  modified_base 59: mod_base = OTHER; note = 2'-O-methyl modified nucleotide
  modified_base 61: mod_base = OTHER; note = 2'-O-methyl modified nucleotide
  modified_base 62: mod_base = OTHER; note = 2'-O-methyl modified nucleotide
  modified_base 63: mod_base = OTHER; note = 2'-O-methyl modified nucleotide
  modified_base 64: mod_base = OTHER; note = 2'-O-methyl modified nucleotide
  modified_base 65: mod_base = OTHER; note = 2'-O-methyl modified nucleotide
  modified_base 66: mod_base = OTHER; note = 2'-O-methyl modified nucleotide
  modified_base 67: mod_base = OTHER; note = 2'-O-methyl modified nucleotide
  modified_base 68: mod_base = OTHER; note = 2'-O-methyl modified nucleotide
  modified_base 69: mod_base = OTHER; note = 2'-O-methyl modified nucleotide
  modified_base 70: mod_base = OTHER; note = 2'-O-methyl modified nucleotide
  modified_base 75: mod_base = OTHER; note = 2'-O-methyl modified nucleotide
  modified_base 77: mod_base = OTHER; note = 2'-O-methyl modified nucleotide
  modified_base 80: mod_base = OTHER; note = 2'-O-methyl modified nucleotide
  modified_base 86: mod_base = OTHER; note = 2'-O-methyl modified nucleotide
  modified_base 87: mod_base = OTHER; note = 2'-O-methyl modified nucleotide
  modified_base 89: mod_base = OTHER; note = 2'-O-methyl modified nucleotide
  modified_base 90: mod_base = OTHER; note = 2'-O-methyl modified nucleotide
  modified_base 91: mod_base = OTHER; note = 2'-O-methyl modified nucleotide
  modified_base 92: mod_base = OTHER; note = 2'-O-methyl modified nucleotide
  modified_base 99: mod_base = OTHER; note = nucleotide with phosphorothioate linkage
  modified_base 100: mod_base = OTHER; note = 2'-O-methyl modified nucleotide with phosphorothioate linkage
  modified_base 101: mod_base = OTHER; note = 2'-O-methyl modified nucleotide

SEQ ID NO: 3116 - RNA, 101 nt, synthetic construct; identical to SEQ ID NO: 1608
  source 1..101: mol_type = other RNA
  modified_base 1: mod_base = OTHER; note = 2'-O-methyl modified nucleotide with phosphorothioate linkage
  modified_base 2: mod_base = OTHER; note = 2'-O-methyl modified nucleotide with phosphorothioate linkage
  modified_base 3: mod_base = OTHER; note = 2'-O-methyl modified nucleotide with phosphorothioate linkage
  modified_base 4: mod_base = OTHER; note = 2'-O-methyl modified nucleotide
  modified_base 5: mod_base = OTHER; note = 2'-O-methyl modified nucleotide
  modified_base 8: mod_base = OTHER; note = 2'-O-methyl modified nucleotide
  modified_base 9: mod_base = OTHER; note = 2'-O-methyl modified nucleotide
  modified_base 11: mod_base = OTHER; note = 2'-O-methyl modified nucleotide
  modified_base 13: mod_base = OTHER; note = 2'-O-methyl modified nucleotide
  modified_base 18: mod_base = OTHER; note = 2'-O-methyl modified nucleotide
  modified_base 22: mod_base = OTHER; note = 2'-O-methyl modified nucleotide
  modified_base 25: mod_base = OTHER; note = 2'-O-methyl modified nucleotide
  modified_base 29: mod_base = OTHER; note = 2'-O-methyl modified nucleotide
  modified_base 30: mod_base = OTHER; note = 2'-O-methyl modified nucleotide
  modified_base 31: mod_base = OTHER; note = 2'-O-methyl modified nucleotide
  modified_base 32: mod_base = OTHER; note = 2'-O-methyl modified nucleotide
  modified_base 37: mod_base = OTHER; note = 2'-O-methyl modified nucleotide
  modified_base 38: mod_base = OTHER; note = 2'-O-methyl modified nucleotide
  modified_base 39: mod_base = OTHER; note = 2'-O-methyl modified nucleotide
  modified_base 40: mod_base = OTHER; note = 2'-O-methyl modified nucleotide
  modified_base 41: mod_base = OTHER; note = 2'-O-methyl modified nucleotide
  modified_base 42: mod_base = OTHER; note = 2'-O-methyl modified nucleotide
  modified_base 43: mod_base = OTHER; note = 2'-O-methyl modified nucleotide
  modified_base 47: mod_base = OTHER; note = 2'-O-methyl modified nucleotide
  modified_base 48: mod_base = OTHER; note = 2'-O-methyl modified nucleotide
  modified_base 51: mod_base = OTHER; note = 2'-O-methyl modified nucleotide
  modified_base 58: mod_base = OTHER; note = 2'-O-methyl modified nucleotide
  modified_base 59: mod_base = OTHER; note = 2'-O-methyl modified nucleotide
  modified_base 61: mod_base = OTHER; note = 2'-O-methyl modified nucleotide
  modified_base 62: mod_base = OTHER; note = 2'-O-methyl modified nucleotide
  modified_base 63: mod_base = OTHER; note = 2'-O-methyl modified nucleotide
  modified_base 64: mod_base = OTHER; note = 2'-O-methyl modified nucleotide
  modified_base 65: mod_base = OTHER; note = 2'-O-methyl modified nucleotide
  modified_base 66: mod_base = OTHER; note = 2'-O-methyl modified nucleotide
  modified_base 67: mod_base = OTHER; note = 2'-O-methyl modified nucleotide
  modified_base 68: mod_base = OTHER; note = 2'-O-methyl modified nucleotide
  modified_base 69: mod_base = OTHER; note = 2'-O-methyl modified nucleotide
  modified_base 70: mod_base = OTHER; note = 2'-O-methyl modified nucleotide
  modified_base 75: mod_base = OTHER; note = 2'-O-methyl modified nucleotide
  modified_base 77: mod_base = OTHER; note = 2'-O-methyl modified nucleotide
  modified_base 80: mod_base = OTHER; note = 2'-O-methyl modified nucleotide
  modified_base 86: mod_base = OTHER; note = 2'-O-methyl modified nucleotide
  modified_base 87: mod_base = OTHER; note = 2'-O-methyl modified nucleotide
  modified_base 89: mod_base = OTHER; note = 2'-O-methyl modified nucleotide
  modified_base 90: mod_base = OTHER; note = 2'-O-methyl modified nucleotide
  modified_base 91: mod_base = OTHER; note = 2'-O-methyl modified nucleotide
  modified_base 92: mod_base = OTHER; note = 2'-O-methyl modified nucleotide
  modified_base 99: mod_base = OTHER; note = nucleotide with phosphorothioate linkage
  modified_base 100: mod_base = OTHER; note = 2'-O-methyl modified nucleotide with phosphorothioate linkage
  modified_base 101: mod_base = OTHER; note = 2'-O-methyl modified nucleotide

SEQ ID NO: 3117 - RNA, 101 nt, synthetic construct; identical to SEQ ID NO: 1609
  source 1..101: mol_type = other RNA
  modified_base 1: mod_base = OTHER; note = 2'-O-methyl modified nucleotide with phosphorothioate linkage
  modified_base 2: mod_base = OTHER; note = 2'-O-methyl modified nucleotide with phosphorothioate linkage
  modified_base 3: mod_base = OTHER; note = 2'-O-methyl modified nucleotide with phosphorothioate linkage
  modified_base 4: mod_base = OTHER; note = 2'-O-methyl modified nucleotide
  modified_base 5: mod_base = OTHER; note = 2'-O-methyl modified nucleotide
  modified_base 8: mod_base = OTHER; note = 2'-O-methyl modified nucleotide
  modified_base 9: mod_base = OTHER; note = 2'-O-methyl modified nucleotide
  modified_base 11: mod_base = OTHER; note = 2'-O-methyl modified nucleotide
  modified_base 13: mod_base = OTHER; note = 2'-O-methyl modified nucleotide
  modified_base 18: mod_base = OTHER; note = 2'-O-methyl modified nucleotide
  modified_base 22: mod_base = OTHER; note = 2'-O-methyl modified nucleotide
  modified_base 25: mod_base = OTHER; note = 2'-O-methyl modified nucleotide
  modified_base 29: mod_base = OTHER; note = 2'-O-methyl modified nucleotide
  modified_base 30: mod_base = OTHER; note = 2'-O-methyl modified nucleotide
  modified_base 31: mod_base = OTHER; note = 2'-O-methyl modified nucleotide
  modified_base 32: mod_base = OTHER; note = 2'-O-methyl modified nucleotide
  modified_base 37: mod_base = OTHER; note = 2'-O-methyl modified nucleotide
  modified_base 38: mod_base = OTHER; note = 2'-O-methyl modified nucleotide
  modified_base 39: mod_base = OTHER; note = 2'-O-methyl modified nucleotide
  modified_base 40: mod_base = OTHER; note = 2'-O-methyl modified nucleotide
  modified_base 41: mod_base = OTHER; note = 2'-O-methyl modified nucleotide
  modified_base 42: mod_base = OTHER; note = 2'-O-methyl modified nucleotide
  modified_base 43: mod_base = OTHER; note = 2'-O-methyl modified nucleotide
  modified_base 47: mod_base = OTHER; note = 2'-O-methyl modified nucleotide
  modified_base 48: mod_base = OTHER; note = 2'-O-methyl modified nucleotide
  modified_base 51: mod_base = OTHER; note = 2'-O-methyl modified nucleotide
  modified_base 58: mod_base = OTHER; note = 2'-O-methyl modified nucleotide
  modified_base 59: mod_base = OTHER; note = 2'-O-methyl modified nucleotide
  modified_base 61: mod_base = OTHER; note = 2'-O-methyl modified nucleotide
  modified_base 62: mod_base = OTHER; note = 2'-O-methyl modified nucleotide
  modified_base 63: mod_base = OTHER; note = 2'-O-methyl modified nucleotide
  modified_base 64: mod_base = OTHER; note = 2'-O-methyl modified nucleotide
  modified_base 65: mod_base = OTHER; note = 2'-O-methyl modified nucleotide
  modified_base 66: mod_base = OTHER; note = 2'-O-methyl modified nucleotide
  modified_base 67: mod_base = OTHER; note = 2'-O-methyl modified nucleotide
  modified_base 68: mod_base = OTHER; note = 2'-O-methyl modified nucleotide
  modified_base 69: mod_base = OTHER; note = 2'-O-methyl modified nucleotide
  modified_base 70: mod_base = OTHER; note = 2'-O-methyl modified nucleotide
  modified_base 75: mod_base = OTHER; note = 2'-O-methyl modified nucleotide
  modified_base 77: mod_base = OTHER; note = 2'-O-methyl modified nucleotide
  modified_base 80: mod_base = OTHER; note = 2'-O-methyl modified nucleotide
  modified_base 86: mod_base = OTHER; note = 2'-O-methyl modified nucleotide
  modified_base 87: mod_base = OTHER; note = 2'-O-methyl modified nucleotide
  modified_base 89: mod_base = OTHER; note = 2'-O-methyl modified nucleotide
  modified_base 90: mod_base = OTHER; note = 2'-O-methyl modified nucleotide
  modified_base 91: mod_base = OTHER; note = 2'-O-methyl modified nucleotide
  modified_base 92: mod_base = OTHER; note = 2'-O-methyl modified nucleotide
  modified_base 99: mod_base = OTHER; note = nucleotide with phosphorothioate linkage
  modified_base 100: mod_base = OTHER; note = 2'-O-methyl modified nucleotide with phosphorothioate linkage
  modified_base 101: mod_base = OTHER; note = 2'-O-methyl modified nucleotide

SEQ ID NO: 3118 - RNA, 100 nt, synthetic construct
  source 1..100: mol_type = other RNA
  modified_base 1: mod_base = OTHER; note = 2'-O-methyl modified nucleotide with phosphorothioate linkage
  modified_base 2: mod_base = OTHER; note = 2'-O-methyl modified nucleotide with phosphorothioate linkage
  modified_base 3: mod_base = OTHER; note = 2'-O-methyl modified nucleotide with phosphorothioate linkage
  modified_base 29: mod_base = OTHER; note = 2'-O-methyl modified nucleotide
  modified_base 30: mod_base = OTHER; note = 2'-O-methyl modified nucleotide
  modified_base 31: mod_base = OTHER; note = 2'-O-methyl modified nucleotide
  modified_base 32: mod_base = OTHER; note = 2'-O-methyl modified nucleotide
  modified_base 33: mod_base = OTHER; note = 2'-O-methyl modified nucleotide
  modified_base 34: mod_base = OTHER; note = 2'-O-methyl modified nucleotide
  modified_base 35: mod_base = OTHER; note = 2'-O-methyl modified nucleotide
  modified_base 36: mod_base = OTHER; note = 2'-O-methyl modified nucleotide
  modified_base 37: mod_base = OTHER; note = 2'-O-methyl modified nucleotide
  modified_base 38: mod_base = OTHER; note = 2'-O-methyl modified nucleotide
  modified_base 39: mod_base = OTHER; note = 2'-O-methyl modified nucleotide
  modified_base 40: mod_base = OTHER; note = 2'-O-methyl modified nucleotide
  modified_base 69: mod_base = OTHER; note = 2'-O-methyl modified nucleotide
  modified_base 70: mod_base = OTHER; note = 2'-O-methyl modified nucleotide
  modified_base 71: mod_base = OTHER; note = 2'-O-methyl modified nucleotide
  modified_base 72: mod_base = OTHER; note = 2'-O-methyl modified nucleotide
  modified_base 73: mod_base = OTHER; note = 2'-O-methyl modified nucleotide
  modified_base 74: mod_base = OTHER; note = 2'-O-methyl modified nucleotide
  modified_base 75: mod_base = OTHER; note = 2'-O-methyl modified nucleotide
  modified_base 76: mod_base = OTHER; note = 2'-O-methyl modified nucleotide
  modified_base 77: mod_base = OTHER; note = 2'-O-methyl modified nucleotide
  modified_base 78: mod_base = OTHER; note = 2'-O-methyl modified nucleotide
  modified_base 79: mod_base = OTHER; note = 2'-O-methyl modified nucleotide
  modified_base 80: mod_base = OTHER; note = 2'-O-methyl modified nucleotide
  modified_base 81: mod_base = OTHER; note = 2'-O-methyl modified nucleotide
  modified_base 82: mod_base = OTHER; note = 2'-O-methyl modified nucleotide
  modified_base 83: mod_base = OTHER; note = 2'-O-methyl modified nucleotide
  modified_base 84: mod_base = OTHER; note = 2'-O-methyl modified nucleotide
  modified_base 85: mod_base = OTHER; note = 2'-O-methyl modified nucleotide
  modified_base 86: mod_base = OTHER; note = 2'-O-methyl modified nucleotide
  modified_base 87: mod_base = OTHER; note = 2'-O-methyl modified nucleotide
  modified_base 88: mod_base = OTHER; note = 2'-O-methyl modified nucleotide
  modified_base 89: mod_base = OTHER; note = 2'-O-methyl modified nucleotide
  modified_base 90: mod_base = OTHER; note = 2'-O-methyl modified nucleotide
  modified_base 91: mod_base = OTHER; note = 2'-O-methyl modified nucleotide
  modified_base 92: mod_base = OTHER; note = 2'-O-methyl modified nucleotide
  modified_base 93: mod_base = OTHER; note = 2'-O-methyl modified nucleotide
  modified_base 94: mod_base = OTHER; note = 2'-O-methyl modified nucleotide
  modified_base 95: mod_base = OTHER; note = 2'-O-methyl modified nucleotide
  modified_base 96: mod_base = OTHER; note = 2'-O-methyl modified nucleotide
  modified_base 97: mod_base = OTHER; note = 2'-O-methyl modified nucleotide with phosphorothioate linkage
  modified_base 98: mod_base = OTHER; note = 2'-O-methyl modified nucleotide with phosphorothioate linkage
  modified_base 99: mod_base = OTHER; note = 2'-O-methyl modified nucleotide with phosphorothioate linkage
  modified_base 100: mod_base = OTHER; note = 2'-O-methyl modified nucleotide
cccccggacggttcaagcaagttttagagctagaaatagcaagttaaaataaggctagtccgttatcaacttgaaaaagtggcaccgagtcggtgctttt

SEQ ID NO: 3119 - RNA, 102 nt, synthetic construct; identical to SEQ ID NO: 706
  source 1..102: mol_type = other RNA
  misc_difference 1: note = a, c, u, g, unknown or other
  misc_difference 2: note = a, c, u, g, unknown or other
  misc_difference 3: note = a, c, u, g, unknown or other
  misc_difference 4: note = a, c, u, g, unknown or other
  misc_difference 5: note = a, c, u, g, unknown or other
  misc_difference 6: note = a, c, u, g, unknown or other
  misc_difference 7: note = a, c, u, g, unknown or other
  misc_difference 8: note = a, c, u, g, unknown or other
  misc_difference 9: note = a, c, u, g, unknown or other
  misc_difference 10: note = a, c, u, g, unknown or other
  misc_difference 11: note = a, c, u, g, unknown or other
  misc_difference 12: note = a, c, u, g, unknown or other
  misc_difference 13: note = a, c, u, g, unknown or other
  misc_difference 14: note = a, c, u, g, unknown or other
  misc_difference 15: note = a, c, u, g, unknown or other
  misc_difference 16: note = a, c, u, g, unknown or other
  misc_difference 17: note = a, c, u, g, unknown or other
  misc_difference 18: note = a, c, u, g, unknown or other
  misc_difference 19: note = a, c, u, g, unknown or other
  misc_difference 20: note = a, c, u, g, unknown or other
  misc_difference 21: note = a, c, u, g, unknown or other
  misc_difference 22: note = a, c, u, g, unknown or other
  misc_difference 23: note = a, c, u, g, unknown or other
  misc_difference 24: note = a, c, u, g, unknown or other
  misc_difference 25: note = a, c, u, g, unknown or other
  misc_difference 1..25: note = This region may encompass 20-25 nucleotides

SEQ ID NO: 3120 - RNA, 106 nt, synthetic construct
  source 1..106: mol_type = other RNA
  misc_difference 1: note = a, c, u, g, unknown or other
  misc_difference 2: note = a, c, u, g, unknown or other
  misc_difference 3: note = a, c, u, g, unknown or other
  misc_difference 4: note = a, c, u, g, unknown or other
  misc_difference 5: note = a, c, u, g, unknown or other
  misc_difference 6: note = a, c, u, g, unknown or other
  misc_difference 7: note = a, c, u, g, unknown or other
  misc_difference 8: note = a, c, u, g, unknown or other
  misc_difference 9: note = a, c, u, g, unknown or other
  misc_difference 10: note = a, c, u, g, unknown or other
  misc_difference 11: note = a, c, u, g, unknown or other
  misc_difference 12: note = a, c, u, g, unknown or other
  misc_difference 13: note = a, c, u, g, unknown or other
  misc_difference 14: note = a, c, u, g, unknown or other
  misc_difference 15: note = a, c, u, g, unknown or other
  misc_difference 16: note = a, c, u, g, unknown or other
  misc_difference 17: note = a, c, u, g, unknown or other
  misc_difference 18: note = a, c, u, g, unknown or other
  misc_difference 19: note = a, c, u, g, unknown or other
  misc_difference 20: note = a, c, u, g, unknown or other
  misc_difference 21: note = a, c, u, g, unknown or other
  misc_difference 22: note = a, c, u, g, unknown or other
  misc_difference 23: note = a, c, u, g, unknown or other
  misc_difference 24: note = a, c, u, g, unknown or other
  misc_difference 25: note = a, c, u, g, unknown or other
  misc_difference 1..25: note = This region may encompass 20-25 nucleotides
nnnnnnnnnnnnnnnnnnnnnnnnngttgtagctccctgaaaccgttgctacaataaggccgtcgaaagatgtgccgcaacgctctgccttctggcatcgtttatt

SEQ ID NO: 3121 - RNA, 108 nt, synthetic construct
  source 1..108: mol_type = other RNA
  misc_difference 1: note = a, c, u, g, unknown or other
  misc_difference 2: note = a, c, u, g, unknown or other
  misc_difference 3: note = a, c, u, g, unknown or other
  misc_difference 4: note = a, c, u, g, unknown or other
  misc_difference 5: note = a, c, u, g, unknown or other
  misc_difference 6: note = a, c, u, g, unknown or other
  misc_difference 7: note = a, c, u, g, unknown or other
  misc_difference 8: note = a, c, u, g, unknown or other
  misc_difference 9: note = a, c, u, g, unknown or other
  misc_difference 10: note = a, c, u, g, unknown or other
  misc_difference 11: note = a, c, u, g, unknown or other
  misc_difference 12: note = a, c, u, g, unknown or other
  misc_difference 13: note = a, c, u, g, unknown or other
  misc_difference 14: note = a, c, u, g, unknown or other
  misc_difference 15: note = a, c, u, g, unknown or other
  misc_difference 16: note = a, c, u, g, unknown or other
  misc_difference 17: note = a, c, u, g, unknown or other
  misc_difference 18: note = a, c, u, g, unknown or other
  misc_difference 19: note = a, c, u, g, unknown or other
  misc_difference 20: note = a, c, u, g, unknown or other
  misc_difference 21: note = a, c, u, g, unknown or other
  misc_difference 22: note = a, c, u, g, unknown or other
  misc_difference 23: note = a, c, u, g, unknown or other
  misc_difference 24: note = a, c, u, g, unknown or other
  misc_difference 25: note = a, c, u, g, unknown or other
  misc_difference 1..25: note = This region may encompass 20-25 nucleotides
nnnnnnnnnnnnnnnnnnnnnnnnngttgtagctccctggaaacccgttgctacaataaggccgtcgaaagatgtgccgcaacgctctgccttctggcatcgtttatt

SEQ ID NO: 3122 - RNA, 10 nt, synthetic construct
  source 1..10: mol_type = other RNA
ttcgaaagac

SEQ ID NO: 3123 - protein, 60 aa, synthetic construct
  VARIANT 1: note = Any amino acid
  VARIANT 3: note = Any amino acid
  VARIANT 5: note = Any amino acid
  VARIANT 7: note = Any amino acid
  VARIANT 9: note = Any amino acid
  VARIANT 11: note = Any amino acid
  VARIANT 13: note = Any amino acid
  VARIANT 15: note = Any amino acid
  VARIANT 17: note = Any amino acid
  VARIANT 19: note = Any amino acid
  VARIANT 21: note = Any amino acid
  VARIANT 23: note = Any amino acid
  VARIANT 25: note = Any amino acid
  VARIANT 27: note = Any amino acid
  VARIANT 29: note = Any amino acid
  VARIANT 31: note = Any amino acid
  VARIANT 33: note = Any amino acid
  VARIANT 35: note = Any amino acid
  VARIANT 37: note = Any amino acid
  VARIANT 39: note = Any amino acid
  VARIANT 41: note = Any amino acid
  VARIANT 43: note = Any amino acid
  VARIANT 45: note = Any amino acid
  VARIANT 47: note = Any amino acid
  VARIANT 49: note = Any amino acid
  VARIANT 51: note = Any amino acid
  VARIANT 53: note = Any amino acid
  VARIANT 55: note = Any amino acid
  VARIANT 57: note = Any amino acid
  VARIANT 59: note = Any amino acid
  VARIANT 1..60: note = This sequence may encompass 1-30 XP repeating units
XPXPXPXPXPXPXPXPXPXPXPXPXPXPXPXPXPXPXPXPXPXPXPXPXPXPXPXPXPXP

SEQ ID NO: 3124 - protein, 6 aa, synthetic construct
HHHHHH

SEQ ID NO: 3125 - protein, 8 aa, synthetic construct
HHHHHHHH

SEQ ID NO: 3126 - RNA, 145 nt, synthetic construct
  source 1..145: mol_type = other RNA
  misc_difference 1: note = a, c, u, g, unknown or other
  misc_difference 2: note = a, c, u, g, unknown or other
  misc_difference 3: note = a, c, u, g, unknown or other
  misc_difference 4: note = a, c, u, g, unknown or other
  misc_difference 5: note = a, c, u, g, unknown or other
  misc_difference 6: note = a, c, u, g, unknown or other
  misc_difference 7: note = a, c, u, g, unknown or other
  misc_difference 8: note = a, c, u, g, unknown or other
  misc_difference 9: note = a, c, u, g, unknown or other
  misc_difference 10: note = a, c, u, g, unknown or other
  misc_difference 11: note = a, c, u, g, unknown or other
  misc_difference 12: note = a, c, u, g, unknown or other
  misc_difference 13: note = a, c, u, g, unknown or other
  misc_difference 14: note = a, c, u, g, unknown or other
  misc_difference 15: note = a, c, u, g, unknown or other
  misc_difference 16: note = a, c, u, g, unknown or other
  misc_difference 17: note = a, c, u, g, unknown or other
  misc_difference 18: note = a, c, u, g, unknown or other
  misc_difference 19: note = a, c, u, g, unknown or other
  misc_difference 20: note = a, c, u, g, unknown or other
  misc_difference 21: note = a, c, u, g, unknown or other
  misc_difference 22: note = a, c, u, g, unknown or other
  misc_difference 23: note = a, c, u, g, unknown or other
  misc_difference 24: note = a, c, u, g, unknown or other
nnnnnnnnnnnnnnnnnnnnnnnngttgtagctccctttctcatttcggaaacgaaatgagaaccgttgctacaataaggccgtctgaaaagatgtgccgcaacgctctgccccttaaagcttctgctttaaggggcatcgttta
